(19) United States
(12) Patent Application Publication
(10) Pub. No.: US 2011/0152340 A1
(43) Pub. Date: Jun. 23, 2011

(54) Methods for Identifying Subjects With an Increased Likelihood of Responding to DPP-IV Inhibitors

(75) Inventors: Eileen Emison, Princeton, NJ (US); Terrye Aigeldinger DelMonte, Princeton, NJ (US); Koustubh Ranade, Princeton, NJ (US); Lisa Renee Rodriguez, Princeton, NJ (US); Katy Lynn Moore Simonsen, Princeton, NJ (US)

(73) Assignee: BRISTOL-MYERS SQUIBB COMPANY, Princeton, NJ (US)

(21) Appl. No.: 12/990,362

(22) PCT Filed: May 18, 2009
(86) PCT No.: PCT/US2009/044376

§ 371 Date: Jan. 28, 2011

Related U.S. Application Data
(60) Provisional application No. 61/054,098, filed on May 16, 2008.

(51) Int. Cl. A61K 31/403; C12Q 1/68; A61P 3/10; C07H 21/04; C40B 30/04

(52) U.S. Cl. 514/412; 435/6.11; 536/23.1; 506/9

(57) ABSTRACT

The invention provides novel in vitro diagnostic methods for identifying subjects or patients who may have an increased likelihood of responding to DPP-IV inhibitor therapy. The invention also provides novel polynucleotides associated with increased responsiveness of a patient to DPP-IV inhibition. Polynucleotide fragments which comprise at least one polymorphic locus, are also provided. Allele-specific primers and probes which hybridize to these polymorphic regions, and/or which comprise at least one polymorphic locus are also provided. The polynucleotides, primers, and probes of the invention are useful in phenotype correlations, medicine, and genetic analysis.

### PRIORITY

[0001] The present invention claims priority to U.S. Provisional Patent Application No. 61/054,098, filed in the United States Patent and Trademark Office on May 16, 2008, the entire contents of which are incorporated herein by reference.

### FIELD OF THE INVENTION

[0002] The invention provides novel in vitro diagnostic methods for identifying subjects who may have an increased likelihood of responding to DPP-IV inhibitor therapy. The invention also provides novel polynucleotides associated with increased responsiveness of a subject to DPP-IV inhibition. Polynucleotide fragments corresponding to the genomic and/or coding regions of these polynucleotides, that comprise at least one polymorphic locus per fragment, are also provided. Allele-specific primers and probes that hybridize to these polymorphic regions, and/or that comprise at least one polymorphic locus are also provided. The polynucleotides, primers, and probes of the invention are useful in diagnostic methods, phenotype correlations, medicine, and genetic analysis.

### BACKGROUND OF THE INVENTION

[0003] At least 171 million people worldwide suffer from type II diabetes (NIDDM), which is characterized by hyperglycemia due to excessive hepatic glucose production and peripheral insulin resistance. Hyperglycemia is considered to be the major risk factor for the development of diabetic complications, and is likely to contribute directly to the impairment of insulin secretion seen in advanced NIDDM. Thus, consistent control of plasma glucose levels in NIDDM patients can offset the development of diabetic complications and beta cell failure seen in advanced disease.

[0004] Maturity Onset Diabetes of the Young (MODY) is characterized by an autosomal dominantly-inherited, early onset form of non-insulin dependent diabetes mellitus. The mean age at time of diagnosis is 23 years, and approximately one-third of patients with MODY develop progressive β-cell failure requiring insulin-replacement therapy (Pearson et al., 2000, Diabet Med. 17:543-545).

[0005] Incretins are hormones released from the gastrointestinal tract in response to nutrient ingestion that potentiate glucose-stimulated insulin secretion from islet beta cells. The two predominant incretins are glucagon-like peptide (GLP)-1 and glucose-dependent insulinotropic peptide (GIP). Unlike other insulinotropic agents, these two peptides stimulate insulin secretion in a glucose-dependent manner. In light of their beneficial actions, GLP-1 and GIP represent potential therapeutic agents for the treatment of type 2 diabetes. However, because exogenous GIP is comparatively less effective than GLP-1 at stimulating insulin secretion in type 2 diabetics, much of the current research has focused on enhancing GLP-1 action for the treatment of type 2 diabetes.

[0006] GLP-1 exerts a number of other biological actions that contribute to its ability to lower glucose, including inhibition of gastric emptying, which reduces meal-associated increases in glycemic excursion. GLP-1 also inhibits glucagon secretion and suppresses food intake in both diabetic and nondiabetic humans. Furthermore, due to its ability to stimulate beta-cell proliferation and neogenesis, as well as its ability to inhibit apoptosis, GLP-1 has the potential to preserve or enhance beta-cell function in human subjects with type 2 diabetes. The therapeutic potential of native GLP-1 is limited, however, by its short physiologic half-life following exogenous administration, due in part to its rapid inactivation by the enzyme dipeptidyl peptidase (DPP)-IV and to renal clearance. As a result, preventing the degradation of native GLP-1 by inhibiting the activity of the DPP-IV enzyme has emerged as a therapeutic strategy for enhancing endogenous GLP-1 action in vivo.

[0007] DPP-IV is a ubiquitously expressed serine protease that exhibits postproline or alanine peptidase activity, thereby generating biologically inactive peptides via cleavage at the N-terminal region after X-proline or X-alanine. Because both GLP-1 and GIP have an alanine residue at position 2, they are substrates for DPP-IV. Thus, DPP-IV inhibitors interfere with the degradation of incretins like GLP-1, thereby increasing the amount of insulin secreted by the pancreas. By enhancing endogenous incretin action, DPP-IV inhibitors are able to (1) lower blood glucose in a glucose-dependent manner; (2) enhance beta-cell mass by promoting proliferation, neogenesis, and survival; and (3) promote satiety, thereby reducing food intake and, subsequently, body weight.

[0008] Currently, DPP-IV inhibitors are being developed to treat type II diabetes, however, many factors remain to be addressed, including the relative importance of their effects on GLP-1 versus GIP, long-term efficacy, side effects, whether they are weight-neutral or associated with weight loss in certain circumstances, and their effects on other DPP-IV substrates.

[0009] It is known that individual phenotypes with respect to drug response or toxicity often result from genetic variations that alter drug metabolism. Thus, in addition to other studies performed with DPP-IV inhibitors, there is a need in the art to identify genetic polymorphisms of genes known to be associated with insulin sensitivity that can predict patient responsiveness to DPP-IV inhibitors, in an effort to improve treatment and to avoid unnecessary side-effects or ineffective treatment of diabetes or other metabolic diseases and disorders.

### SUMMARY OF THE INVENTION

[0010] The invention provides reagents and methods relating to detecting genetic polymorphisms in SEQ ID NO: 1, SEQ ID NO: 3, SEQ ID NO: 5, and SEQ ID NO: 63 that can be used to identify patients most likely to respond to DPP-IV inhibition. Genotypes of such polymorphisms can be predictive of an individual's likelihood of responding to DPP-IV inhibition and can be used to establish a treatment regimen optimized for each individual, wherein the presence of variant gene sequences at particular positions of certain genes has been associated as set forth herein with a decreased likelihood of favorable responsiveness to administration of a DPP-IV inhibitor or a DPP-IV inhibitor in combination with other oral antidiabetic therapy in an individual with NIDDM bearing any of these various variant gene sequences.

[0011] The invention provides methods for determining individuals more likely to have a favorable response to the administration of a therapeutically-effective amount of a DPP-IV inhibitor or a DPP-IV inhibitor in combination with other oral antidiabetic therapy, comprising the step of determining whether the individual harbors either the reference allele or variant allele at one or more polymorphic loci of SEQ ID NO: 1, SEQ ID NO: 3, SEQ ID NO: 5, and SEQ ID NO: 63, wherein an individual harboring the reference allele(s) of a TEKT5, GRINL1A, HSD11B1 or CHST10 gene would be more likely to have a favorable response to an administered DPP-IV inhibitor relative to an individual harboring a variant allele(s) of a TEKT5, GRINL1A, HSD11B1 or CHST10 gene as disclosed herein.

[0012] In a particular embodiment, an individual harboring the reference thymidine allele at position 87,992 of SEQ ID NO: 1 (the GRINL1A gene) is more likely to have a favorable response to an administered DPP-IV inhibitor or a DPP-IV inhibitor in combination with other oral antidiabetic therapy relative to an individual harboring the variant cytidine allele at position 87,992 of SEQ ID NO: 2. Thus, in certain embodiments of the invention, methods for determining whether an individual is more likely to have a favorable response to the administration of a therapeutically-effective amount of a DPP-IV inhibitor or a DPP-IV inhibitor in combination with other oral antidiabetic therapy comprise the step of determining whether the individual harbors the reference thymidine allele at position 87,992 of SEQ ID NO: 1 of the GRINL1A gene.

[0013] In another embodiment, an individual harboring the reference cytidine allele at position 34,403 of SEQ ID NO: 3 (the HSD11B1 gene) is more likely to have a favorable response to an administered DPP-IV inhibitor or a DPP-IV inhibitor in combination with other oral antidiabetic therapy relative to an individual harboring the variant thymidine allele at position 34,403 of SEQ ID NO: 4. Thus, in certain embodiments of the invention, methods for determining whether an individual is more likely to have a favorable response to the administration of a therapeutically-effective amount of a DPP-IV inhibitor or a DPP-IV inhibitor in combination with other oral antidiabetic therapy comprise the step of determining whether the individual harbors the reference cytidine allele at position 34,403 of SEQ ID NO: 3 of the HSD11B1 gene.

[0014] In other embodiments, an individual harboring the reference guanosine allele at position 24,707 of SEQ ID NO: 5 (the CHST10 gene) is more likely to have a favorable response to an administered DPP-IV inhibitor or a DPP-IV inhibitor in combination with other oral antidiabetic therapy relative to an individual harboring the variant adenosine allele at position 24,707 of SEQ ID NO: 6 (the CHST10 gene). Likewise, as disclosed herein, an individual harboring the reference cytidine allele at position 34,078 of SEQ ID NO: 5 is more likely to have a favorable response to an administered DPP-IV inhibitor or a DPP-IV inhibitor in combination with other oral antidiabetic therapy relative to an individual harboring the variant thymidine allele at position 34,078 of SEQ ID NO: 7 (the CHST10 gene). Also, as disclosed herein, an individual harboring the reference guanosine allele at position 35,799 of SEQ ID NO: 5 is more likely to have a favorable response to an administered DPP-IV inhibitor or a DPP-IV inhibitor in combination with other oral antidiabetic therapy relative to an individual harboring the variant cytidine allele at position 35,799 of SEQ ID NO: 8 (the CHST10 gene). Also, as disclosed herein, an individual harboring the reference adenosine allele at position 38,709 of SEQ ID NO: 5 is more likely to have a favorable response to an administered DPP-IV inhibitor or a DPP-IV inhibitor in combination with other oral antidiabetic therapy relative to an individual harboring the variant guanosine allele at position 38,709 of SEQ ID NO: 9 (the CHST10 gene). In addition, as disclosed herein, an individual harboring the reference cytidine allele at position 38,947 of SEQ ID NO: 5 his more likely to have a favorable response to an administered DPP-IV inhibitor or a DPP-IV inhibitor in combination with other oral antidiabetic therapy relative to an individual harboring the variant adenosine allele at position 38,947 of SEQ ID NO: 10 (the CHST10 gene). In addition, as disclosed herein, an individual harboring the reference thymidine allele at position 41,180 of SEQ ID NO: 5 is more likely to have a favorable response to an administered DPP-IV inhibitor or a DPP-IV inhibitor in combination with other oral antidiabetic therapy relative to an individual harboring the variant cytidine allele at position 41,180 of SEQ ID NO: 11 (the CHST10 gene). Thus, in certain embodiments of the invention, methods for determining whether an individual is more likely to have a favorable response to the administration of a therapeutically-effective amount of a DPP-IV inhibitor or a DPP-IV inhibitor in combination with other oral antidiabetic therapy comprise the step of determining whether the individual harbors the reference allele at position 24,707, 34,078, 35,799, 38,709, 38,947, and/or 41,180 of SEQ ID NO: 5 of the CHST10 gene.

[0015] In further embodiments, an individual harboring the reference thymidine allele at position 26,472 of SEQ ID NO: 63 (the TEKT5 gene) is more likely to have a favorable response to an administered DPP-IV inhibitor or a DPP-IV inhibitor in combination with other oral antidiabetic therapy relative to an individual harboring the variant cytidine allele at position 26,472 of SEQ ID NO: 64. Thus, in certain embodiments of the invention, methods for determining whether an individual is more likely to have a favorable response to the administration of a therapeutically-effective amount of a DPP-IV inhibitor or a DPP-IV inhibitor in combination with other oral antidiabetic therapy comprise the step of determining whether the individual harbors the reference thymidine allele at position 26,472 of SEQ ID NO: 63 of the TEKT5 gene.

[0016] The methods also can be used to determine whether the individual may respond to a lower level of administered DPP-IV inhibitor or a DPP-IV inhibitor in combination with other oral antidiabetic therapy comprising the step of determining whether the individual harbors either the reference allele or variant allele at one or more polymorphic loci of TEKT5, GRINL1A, HSD11B1 or CHST10 gene, wherein an individual harboring the reference allele of TEKT5, GRINL1A, HSD11B1, or CHST10 gene, including, for example, the reference allele (“T”) found at position 26,472 of SEQ ID NO: 63 (the TEKT5 gene), the reference allele (“A”) found at position 87,712 of SEQ ID NO: 1 (the GRINL1A gene), the reference allele (“T”) found at position 87,992 of SEQ ID NO: 1, the reference allele (“A”) found at position 89,441 of SEQ ID NO: 1, the reference allele (“G”) found at position 89,662 of SEQ ID NO: 1, the reference allele (“G”) found at position 89,853 of SEQ ID NO: 1, the reference allele (“G”) found at position 93,598 of SEQ ID NO: 1, the reference allele (“G”) found at position 93,955 of SEQ ID NO: 1, the reference allele (“C”) found at position 34,403 of SEQ ID NO: 3 (the HSD11B1 gene), or the reference allele (“G”) found at position 24,707 of SEQ ID NO: 5 (the CHST10 gene), the reference allele (“C”) found at position 34,078 of SEQ ID NO: 5, the reference allele (“G”) found at position 35,799 of SEQ ID NO: 5, the reference allele (“A”) found at position 38,709 of SEQ ID NO: 5, the reference allele (“C”) found at position 38,947 of SEQ ID NO: 5, and/or the reference allele (“T”) found at position 41,180 of SEQ ID NO: 5, is more likely to respond to a lower level of administered DPP-IV inhibitor relative to an individual harboring the corresponding variant allele of a TEKT5, GRINL1A, HSD11B1 or CHST10 gene, including, for example, the variant allele (“C”) found at position 26,472 of SEQ ID NO: 64 (the TEKT5 gene), the variant allele (“G”) found at position 87,712 of SEQ ID NO: 73 (the GRINL1A gene), the variant allele (“C”) found at position 87,992 of SEQ ID NO: 2 (the GRINL1A gene), the variant allele (“G”) found at position 89,441 of SEQ ID NO: 69 (the GRINL1A gene), the variant allele (“A”) found at position 89,662 of SEQ ID NO: 70 (the GRINL1A gene?), the variant allele (“A”) found at position 89,853 of SEQ ID NO: 71 (the GRINL1A gene), the variant allele (“A”) found at position 93,598 of SEQ ID NO: 74 (the GRINL1A gene) the variant allele (“C”) found at position 93,955 of SEQ ID NO: 72 (the GRINL1A gene), the variant allele (“T”) found at position 34,403 of SEQ ID NO: 4 (the HSD11B1 gene), the variant allele (“A”) found at position 24,707 of SEQ ID NO: 6 (the CHST10 gene), the variant allele (“T”) found at position 34,078 of SEQ ID NO: 7 (the CHST10 gene), the variant allele (“C”) found at position 35,799 of SEQ ID NO: 8 (the CHST10 gene), the variant allele (“G”) found at position 38,709 of SEQ ID NO: 9 (the CHST10 gene), the variant allele (“A”) found at position 38,947 of SEQ ID NO: 10 (the CHST10 gene) and/or the variant allele(s) (“C”) found at position 41,180 of SEQ ID NO: 11 (the CHST10 gene).

[0017] Likewise, the invention provides methods for determining whether an individual is less likely to have a favorable response to the administration of a therapeutically-effective amount of a DPP-IV inhibitor or a DPP-IV inhibitor in combination with other oral antidiabetic therapy, comprising the step of determining whether the individual harbors either the reference allele or variant allele at one or more polymorphic loci of a TEKT5, GRINL1A, HSD11B1 or CHST10 gene, wherein an individual harboring the variant allele at one or more polymorphic loci of a TEKT5, GRINL1A, HSD11B1 or CHST10 gene is less likely to have a favorable response to an administered DPP-IV inhibitor or a DPP-IV inhibitor in combination with other oral antidiabetic therapy relative to an individual harboring the reference allele of a TEKT5, GRINL1A, HSD11B1 or CHST10 gene.

[0018] As disclosed herein, an individual harboring the variant thymidine allele at position 34,403 of SEQ ID NO: 4 (the HSD11B1 gene) is less likely to have a favorable response to an administered DPP-IV inhibitor or a DPP-IV inhibitor in combination with other oral antidiabetic therapy relative to an individual harboring the reference cytidine allele at position 34,403 of SEQ ID NO: 3. Thus, in certain embodiments of the invention, methods for determining whether an individual is less likely to have a favorable response to the administration of a therapeutically-effective amount of a DPP-IV inhibitor or a DPP-IV inhibitor in combination with other oral antidiabetic therapy comprise the step of determining whether the individual harbors the variant thymidine allele at position 34,403 of SEQ ID NO: 4 of the HSD11B1 gene.

[0019] As disclosed herein, an individual harboring the variant adenosine allele at position 24,707 of SEQ ID NO: 6 (the CHST10 gene) is less likely to have a favorable response to an administered DPP-IV inhibitor relative to an individual harboring the reference guanosine allele at position 24,707 of SEQ ID NO: 5. Thus, in certain embodiments of the invention, methods for determining whether an individual is less likely to have a favorable response to the administration of a therapeutically-effective amount of a DPP-IV inhibitor or a DPP-IV inhibitor in combination with other oral antidiabetic therapy comprise the step of determining whether the individual harbors the variant adenosine allele at position 24,707 of SEQ ID NO: 6 of the CHST10 gene.

[0020] As disclosed herein, an individual harboring the variant thymidine allele at position 34,078 of SEQ ID NO: 7 (the CHST10 gene) is less likely to have a favorable response to an administered DPP-IV inhibitor or a DPP-IV inhibitor in combination with other oral antidiabetic therapy relative to an individual harboring the reference cytidine allele at position 34,078 of SEQ ID NO: 5. Thus, in certain embodiments of the invention, methods for determining whether an individual is less likely to have a favorable response to the administration of a therapeutically-effective amount of a DPP-IV inhibitor or a DPP-IV inhibitor in combination with other oral antidiabetic therapy comprise the step of determining whether the individual harbors the variant thymidine allele at position 34,078 of SEQ ID NO: 7 of the CHST10 gene.

[0021] As disclosed herein, an individual harboring the variant cytidine allele at position 35,799 of SEQ ID NO: 8 (the CHST10 gene) is less likely to have a favorable response to an administered DPP-IV inhibitor or a DPP-IV inhibitor in combination with other oral antidiabetic therapy relative to an individual harboring the reference guanosine allele at position 35,799 of SEQ ID NO: 5. Thus, in certain embodiments of the invention, methods for determining whether an individual is less likely to have a favorable response to the administration of a therapeutically-effective amount of a DPP-IV inhibitor or a DPP-IV inhibitor in combination with other oral antidiabetic therapy comprise the step of determining whether the individual harbors the variant cytidine allele at position 35,799 of SEQ ID NO: 8 of the CHST10 gene.

[0022] As disclosed herein, an individual harboring the variant guanosine allele at position 38,709 of SEQ ID NO: 9 (the CHST10 gene) is less likely to have a favorable response to an administered DPP-IV inhibitor or a DPP-IV inhibitor in combination with other oral antidiabetic therapy relative to an individual harboring the reference adenosine allele at position 38,709 of SEQ ID NO: 5. Thus, in certain embodiments of the invention, methods for determining whether an individual is less likely to have a favorable response to the administration of a therapeutically-effective amount of a DPP-IV inhibitor or a DPP-IV inhibitor in combination with other oral antidiabetic therapy comprise the step of determining whether the individual harbors the variant guanosine allele at position 38,709 of SEQ ID NO: 9 of the CHST10 gene.

[0023] As disclosed herein, an individual harboring the variant adenosine allele at position 38,947 of SEQ ID NO: 10 (the CHST10 gene) is less likely to have a favorable response to an administered DPP-IV inhibitor or a DPP-IV inhibitor in combination with other oral antidiabetic therapy relative to an individual harboring the reference cytidine allele at position 38,947 of SEQ ID NO: 5. Thus, in certain embodiments of the invention, methods for determining whether an individual is less likely to have a favorable response to the administration of a therapeutically-effective amount of a DPP-IV inhibitor or a DPP-IV inhibitor in combination with other oral antidiabetic therapy comprise the step of determining whether the individual harbors the variant adenosine allele at position 38,947 of SEQ ID NO: 10 of the CHST10 gene.

[0024] As disclosed herein, an individual harboring the variant cytidine allele at position 41,180 of SEQ ID NO: 11 (the CHST10 gene) is less likely to have a favorable response to an administered DPP-IV inhibitor or a DPP-IV inhibitor in combination with other oral antidiabetic therapy relative to an individual harboring the reference thymidine allele at position 41,180 of SEQ ID NO: 5. Thus, in certain embodiments of the invention, methods for determining whether an individual is less likely to have a favorable response to the administration of a therapeutically-effective amount of a DPP-IV inhibitor or a DPP-IV inhibitor in combination with other oral antidiabetic therapy comprise the step of determining whether the individual harbors the variant cytidine allele at position 41,180 of SEQ ID NO: 11 of the CHST10 gene.

[0025] As disclosed herein, an individual harboring the variant allele(s) at any one or more of nucleotide positions 24,707, 34,078, 35,799, 38,709, 38,947 and 41,180 of SEQ ID NO: 12 is less likely to have a favorable response to an administered DPP-IV inhibitor or a DPP-IV inhibitor in combination with other oral antidiabetic therapy relative to an individual harboring the reference allele at any one or more positions 24,707, 34,078, 35,799, 38,709, 38,947, and 41,180 of SEQ ID NO: 5. Thus, in certain embodiments of the invention, methods for determining whether an individual is less likely to have a favorable response to the administration of a therapeutically-effective amount of a DPP-IV inhibitor or a DPP-IV inhibitor in combination with other oral antidiabetic therapy comprise the step of determining whether the individual harbors the variant allele(s) at one or more of nucleotide positions 24,707, 34,078, 35,799, 38,709, 38,947 and 41,180 of SEQ ID NO: 12 of the CHST10 gene.

[0026] As disclosed herein, an individual harboring the variant cytidine allele at position 26,472 of SEQ ID NO: 64 (the TEKT5 gene) is less likely to have a favorable response to an administered DPP-IV inhibitor or a DPP-IV inhibitor in combination with other oral antidiabetic therapy relative to an individual harboring the reference thymidine allele at position 26,472 of SEQ ID NO: 63. Thus, in certain embodiments of the invention, methods for determining whether an individual is less likely to have a favorable response to the administration of a therapeutically-effective amount of a DPP-IV inhibitor or a DPP-IV inhibitor in combination with other oral antidiabetic therapy comprise the step of determining whether the individual harbors the variant cytidine allele at position 26,472 of SEQ ID NO: 64 of the TEKT5 gene.

[0027] As disclosed herein, an individual harboring the variant allele(s) at any one or more of nucleotide positions 87,712, 87,992, 89,441, 89,662, 89,853, 93,598 and 93,955 of SEQ ID NO: 2 (the GRINL1A gene) is less likely to have a favorable response to an administered DPP-IV inhibitor or a DPP-IV inhibitor in combination with other oral antidiabetic therapy relative to an individual harboring the reference allele at any one or more positions 87,712, 87,992, 89,441, 89,662, 89,853, 93,598 and 93,955 of SEQ ID NO: 1. Thus, in certain embodiments of the invention, methods for determining whether an individual is less likely to have a favorable response to the administration of a therapeutically-effective amount of a DPP-IV inhibitor or a DPP-IV inhibitor in combination with other oral antidiabetic therapy comprise the step of determining whether the individual harbors the variant allele(s) at one or more of nucleotide positions 87,712, 87,992, 89,441, 89,662, 89,853, 93,598 and 93,955 of SEQ ID NO: 77 of the GRINL1A gene.

[0028] The methods also can be used to determine whether the individual may require a higher level of administered DPP-IV inhibitor or a DPP-IV inhibitor in combination with other oral antidiabetic therapy comprising the step of determining whether the individual harbors either the reference allele or variant allele at one or more polymorphic loci of SEQ ID NO: 1, SEQ ID NO: 3, SEQ ID NO: 5, and SEQ ID NO: 63, wherein an individual harboring the variant allele of a TEKT5, GRINL1A, HSD11B1 or CHST10 gene, including, for example, the variant allele (“C”) found at position 26,472 of SEQ ID NO: 64 (the TEKT5 gene), the variant allele (“C”) found at position 87,992 of SEQ ID NO: 2 (the GRINL1A gene), the variant allele (“G”) found at position 87,712 of SEQ ID NO: 73 (the GRINL1A gene), the variant allele (“G”) found at position 89,441 of SEQ ID NO: 69 (the GRINL1A gene), the variant allele (“A”) found at position 89,662 of SEQ ID NO: 70 (the GRINL1A gene), the variant allele (“A”) found at position 89,853 of SEQ ID NO: 71 (the GRINL1A gene), the variant allele (“A”) found at position 93,598 of SEQ ID NO: 74 (the GRINL1A gene), the variant allele (“C”) found at position 94,074 of SEQ ID NO: 72 (the GRINL1A gene), the variant allele (“T”) found at position 34,403 of SEQ ID NO: 4 (the HSD11B1 gene), the variant allele (“A”) found at position 24,707 of SEQ ID NO: 6 (the CHST10 gene), the variant allele (“T”) found at position 34,078 of SEQ ID NO: 7 (the CHST10 gene), the variant allele (“C”) found at position 35,799 of SEQ ID NO: 8 (the CHST10 gene), the variant allele (“G”) found at position 38,709 of SEQ ID NO: 9 (the CHST10 gene), the variant allele (“A”) found at position 38,947 of SEQ ID NO: 10 (the CHST10 gene) and/or the variant allele (“C”) found at position 41,180 of SEQ ID NO: 11 (the CHST10 gene), is more likely to require a higher level of administered DPP-IV inhibitor relative to an individual harboring the reference allele of a TEKT5, GRINL1A, HSD11B1 or CHST10 gene including, for example, the reference allele (“T”) found at position 26,472 of SEQ ID NO: 63, the reference allele (“T”) found at position 87,992 of SEQ ID NO: 1, the reference allele (“G”) found at position 87,712 of SEQ ID NO: 1, the reference allele (“G”) found at position 89,441 of SEQ ID NO: 1, the reference allele (“A”) found at position 89,662 of SEQ ID NO: 1, the reference allele (“A”) found at position 89,853 of SEQ ID NO: 1, the reference allele (“A”) found at position 93,598 of SEQ ID NO: 1, the reference allele (“C”) found at position 94,074 of SEQ ID NO: 1, the reference allele (“T”) found at position 87,992 of SEQ ID NO: 1, the reference allele (“C”) found at position 34,403 of SEQ ID NO: 3, the reference allele (“G”) found at position 24,707 of SEQ ID NO: 5, the reference allele (“C”) found at position 34,078 of SEQ ID NO: 5, the reference allele (“G”) found at position 35,799 of SEQ ID NO: 5, the reference allele (“A”) found at position 38,709 of SEQ ID NO: 5, the reference allele (“C”) found at position 38,947 of SEQ ID NO: 5, and/or the reference allele (“T”) found at position 41,180 of SEQ ID NO: 5.

[0029] The invention further provides nucleic acid molecules comprising at least one single nucleotide polymorphism (SNP) within SEQ ID NO: 1, SEQ ID NO: 3, SEQ ID NO: 5, and/or SEQ ID NO: 63 at a particular polymorphic locus. In certain embodiments, the invention provides the reference allele of a human TEKT5, GRINL1A, HSD11B1, or CHST10 gene. In certain embodiments, the invention provides a human TEKT5, GRINL1A, HSD11B1, or CHST10 polynucleotide comprising at least one single nucleotide polymorphism having a reference allele, which reference allele differs from a variant allele by one nucleotide at nucleotide position 26,472 of SEQ ID NO: 63 for the TEKT5 gene, at nucleotide positions 87,693, 87,992, 89,441, 89,662, 89,853, 93,598, and/or 94,074 of SEQ ID NO: 1 for the GRINL1A gene, at nucleotide position 34,403 of SEQ ID NO: 3 for the HSD11B1 gene, and/or at nucleotide positions 24,707, 34,078, 35,799, 38,709, 38,947, and/or 41,180 of SEQ ID NO: 5 for the CHST10 gene. The invention further relates to the complementary sequences of each of the sequences in SEQ ID NOs: 1, 3, 5, and 63. In certain embodiments, the invention provides a TEKT5 polynucleotide comprising SEQ ID NO: 63. SEQ ID NO: 63 contains a single nucleotide polymorphism having a reference allele, wherein the reference allele comprises a thymidine nucleotide at position 26,472. In further embodiments, the invention provides a GRINL1A polynucleotide comprising SEQ ID NO: 1. SEQ ID NO: 1 contains a single nucleotide polymorphism having one or more references allele(s), wherein the reference allele(s) comprises an adenosine nucleotide at position 87,712, a thymidine nucleotide at position 87,992, an adenosine nucleotide at position 89,441, a guanosine nucleotide at position 89,662, a guanosine nucleotide at position 89,853, a guanosine nucleotide at position 93,598, and a guanosine at position 94,074. In further embodiments, the invention provides an HSD11B1 polynucleotide comprising SEQ ID NO: 3. SEQ ID NO: 3 contains a single nucleotide polymorphism having a reference allele, wherein the reference allele comprises a cytidine nucleotide at position 34,403. In further embodiments, the invention provides a CHST10 polynucleotide comprising SEQ ID NO: 5. SEQ ID NO: 5 contains a single nucleotide polymorphism having one or more reference allele(s), wherein the reference allele(s) comprises a guanosine nucleotide at position 24,707, a cytidine nucleotide at position 34,078, a guanosine nucleotide at position 35,799, an adenosine nucleotide at position 38,709, a cytidine nucleotide at position 38,947, and a thymidine nucleotide at position 41,180.

[0030] In other embodiments, the invention provides the variant allele of a human TEKT5, GRINL1A, HSD11B1 or CHST10 gene. Also, in other embodiments, the invention provides a human TEKT5, GRINL1A, HSD11B1 or CHST10 polynucleotide comprising at least one single nucleotide polymorphism having a variant allele, which variant allele differs from a reference allele by one nucleotide at nucleotide position 26,472 of SEQ ID NO: 64 for the TEKT5 gene, at nucleotide position 87,712 of SEQ ID NO: 73, nucleotide position 87,992 of SEQ ID NO: 2, nucleotide position 89,441 of SEQ ID NO: 69, nucleotide position 89,662 of SEQ ID NO: 70; nucleotide position 89,853 of SEQ ID NO: 71; nucleotide position 93,598 of SEQ ID NO: 74; and/or nucleotide position 93,994 of SEQ ID NO: 72 for the GRINL1A gene, at nucleotide position 34,403 of SEQ ID NO: 4 for the HSD11B1 gene, and/or at nucleotide position 24,707 of SEQ ID NO: 6, nucleotide position 34,078 of SEQ ID NO: 7, nucleotide position 35,799 of SEQ ID NO: 8, nucleotide position 38,709 of SEQ ID NO: 9, nucleotide position 38,947 at SEQ ID NO: 10, and/or nucleotide position 41,180 of SEQ ID NO: 11 for the CHST10 gene. The invention further relates to the complementary sequences of each of the sequences in SEQ ID NOs: 2, 4, 6, 7, 8, 9, 10, 11, 64, and 70. In certain embodiments, the invention provides a TEKT5 polynucleotide comprising SEQ ID NO: 64. SEQ ID NO: 64 contains a single nucleotide polymorphism having a variant allele, wherein the variant allele is a cytidine nucleotide at position 26,472. In further embodiments, the invention provides a GRINL1A polynucleotide comprising any of SEQ ID NOs: 70-77. SEQ ID NO: 2 contains a single nucleotide polymorphism having a variant allele, wherein the variant allele is a cytidine nucleotide at position 87,992; SEQ ID NO: 69 contains a single nucleotide polymorphism having a variant allele, wherein the variant allele is a guanosine nucleotide at position 89,441; SEQ ID NO: 70 contains a single nucleotide polymorphism having a variant allele, wherein the variant allele is an adenosine nucleotide at position 89,662; SEQ ID NO: 71 contains a single nucleotide polymorphism having a variant allele, wherein the variant allele is an adenosine nucleotide at position 89,853; SEQ ID NO: 72 contains a single nucleotide polymorphism having a variant allele, wherein the variant allele is a cytidine nucleotide at position 94,074; SEQ ID NO: 73 contains a single nucleotide polymorphism having a variant allele, wherein the variant allele is a guanosine nucleotide at position 87,712; SEQ ID NO: 74 contains a single nucleotide polymorphism having a variant allele, wherein the variant allele is an adenosine nucleotide at position 93,598; SEQ ID NO: 77 contains a single nucleotide polymorphism at one or more sites, including variant alleles, wherein the variant allele is present at position(s) 87,712, 87,992, 89,441, 89,662, 89,853, 93,598, and/or 94,074. In further embodiments, the invention provides an HSD11B1 polynucleotide comprising SEQ ID NO: 4. SEQ ID NO: 4 contains a single nucleotide polymorphism having a variant allele, wherein the variant allele is a thymidine nucleotide at position 34,403. In further embodiments, the invention provides a CHST10 polynucleotide comprising any of SEQ ID NOs: 6-12. SEQ ID NO: 6 contains a single nucleotide polymorphism having a variant allele, wherein the variant allele is an adenosine nucleotide at position 24,707; SEQ ID NO: 7 contains a single nucleotide polymorphism having a variant allele, wherein the variant allele is a thymidine at position 34,078; SEQ ID NO: 8 contains a single nucleotide polymorphism having a variant allele, wherein the variant allele is a cytidine at position 35,799; SEQ ID NO: 9 contains a single nucleotide polymorphism having a variant allele, wherein the variant allele is a guanosine at position 38,709; SEQ ID NO: 10 contains a single nucleotide polymorphism having a variant allele, wherein the variant allele is an adenosine at position 38,947; SEQ ID NO: 11 contains a single nucleotide polymorphism having a variant allele, wherein the variant allele is an cytidine at position 41,180, SEQ ID NO: 12 contains a single nucleotide polymorphism at one or more sites, including variant alleles, wherein the variant allele is present at position(s) 24,707, 34,078, 35,799, 38,709, 38,947 and/or 41,180.

[0031] The invention further provides variant and reference allele-specific oligonucleotides that hybridize to a nucleic acid sequence comprising at least one polymorphic locus, in addition to the complement of said nucleic acid sequence. These oligonucleotides can be probes or primers, for example, oligonucleotide primers used to amplify a nucleic acid sequence across a polymorphic locus and oligonucleotide primers used to sequence the amplified nucleic acid sequences. Thus, the invention further provides oligonucleotides that can be used to amplify a portion of a polynucleotide of the invention, or fragment thereof, comprising either a variant or reference allele(s) at one or more polymorphic loci. The invention also provides oligonucleotides that can be used to sequence said amplified sequence(s). Methods for using such oligonucleotides to amplify and sequence target nucleic acid sequences are described herein and also well-known in the art.

[0032] In certain embodiments, the invention provides oligonucleotides between 15 and 40 nucleotides in length that hybridize to a nucleic acid sequence that spans a polymorphic locus (i.e., SNP-containing fragment) found in a human TEKT5, GRINL1A, HSD11B1, or CHST10 gene. In particular embodiments, the invention provides oligonucleotides that hybridize to a nucleic acid sequence that spans a polymorphic locus found in SEQ ID NOs: 1, 3, 5, 63, or 69, including, for example, a nucleic acid sequence that spans the polymorphic locus containing a reference allele at nucleotide position 26,472 of SEQ ID NO: 63, a nucleic acid sequence that spans the polymorphic locus containing a reference allele at nucleotide position 87,712 of SEQ ID NO: 1, a nucleic acid sequence that spans the polymorphic locus containing a reference allele at nucleotide position 87,992 of SEQ ID NO: 1, a nucleic acid sequence that spans the polymorphic locus containing a reference allele at nucleotide position 89,441 of SEQ ID NO: 1, a nucleic acid sequence that spans the polymorphic locus containing a reference allele at nucleotide position 89,662 of SEQ ID NO: 1, a nucleic acid sequence that spans the polymorphic locus containing a reference allele at nucleotide position 89,853 of SEQ ID NO: 1, a nucleic acid sequence that spans the polymorphic locus containing a reference allele at nucleotide position 93,598 of SEQ ID NO: 1, a nucleic acid sequence that spans the polymorphic locus containing a reference allele at nucleotide position 94,074 of SEQ ID NO: 1, a nucleic acid sequence that spans the polymorphic locus containing a reference allele at nucleotide position 34,403 of SEQ ID NO: 3, a nucleic acid sequence that spans the polymorphic locus containing a reference allele at nucleotide position 24,707 of SEQ ID NO: 5, a nucleic acid sequence that spans the polymorphic locus containing a reference allele at nucleotide position 34,078 of SEQ ID NO: 5, a nucleic acid sequence that spans the polymorphic locus containing a reference allele at nucleotide position 35,799 of SEQ ID NO: 5, a nucleic acid sequence that spans the polymorphic locus containing a reference allele at nucleotide position 38,709 of SEQ ID NO: 5, a nucleic acid sequence that spans the polymorphic locus containing a reference allele at nucleotide position 38,947 of SEQ ID NO: 5, and a nucleic acid sequence that spans the polymorphic locus containing a reference allele at nucleotide position 41,180 of SEQ ID NO: 5.

[0033] In certain other embodiments, the invention provides oligonucleotides between 12 and 25 nucleotides in length that hybridize to a nucleic acid sequence that spans a polymorphic locus found in SEQ ID NOs: 2, 4, 6, 7, 8, 9, 10, 11, 12, 64, 69, 70, 71, 72, 73, 74, or 75, including, for example, a nucleic acid sequence that spans the polymorphic locus containing a variant allele at nucleotide position 26,472 of SEQ ID NO: 64, a nucleic acid sequence that spans the polymorphic locus containing a variant allele at nucleotide position 87,992 of SEQ ID NO: 2 or 75, a nucleic acid sequence that spans the polymorphic locus containing a variant allele at nucleotide position 89,441 of SEQ ID NO: 69 or 75, a nucleic acid sequence that spans the polymorphic locus containing a variant allele at nucleotide position 89,662 of SEQ ID NO: 70 or 75, a nucleic acid sequence that spans the polymorphic locus containing a variant allele at nucleotide position 89,853 of SEQ ID NO: 71 or 75, a nucleic acid sequence that spans the polymorphic locus containing a variant allele at nucleotide position 94,074 of SEQ ID NO: 72 or 75, a nucleic acid sequence that spans the polymorphic locus containing a variant allele at nucleotide position 87,712 of SEQ ID NO: 73 or 75, a nucleic acid sequence that spans the polymorphic locus containing a variant allele at nucleotide position 93,598 of SEQ ID NO: 74 or 75, a nucleic acid sequence that spans the polymorphic locus containing a variant allele at nucleotide position 34,403 of SEQ ID NO: 4, a nucleic acid sequence that spans the polymorphic locus containing a variant allele at nucleotide position 24,707 of SEQ ID NO: 6 or 12, a nucleic acid sequence that spans the polymorphic locus containing a variant allele at nucleotide position 34,078 of SEQ ID NO: 7 or 12, a nucleic acid sequence that spans the polymorphic locus containing a variant allele at nucleotide position 35,799 of SEQ ID NO: 8 or 12, a nucleic acid sequence that spans the polymorphic locus containing a variant allele at nucleotide position 38,709 of SEQ ID NO: 9 or 12, a nucleic acid sequence that spans the polymorphic locus containing a variant allele at nucleotide position 38,947 of SEQ ID NO: 10 or 12, and a nucleic acid sequence that spans the polymorphic locus containing a variant allele at nucleotide position 41,180 of SEQ ID NO: 11 or 12. In other particular embodiments, the oligonucleotides comprise any of SEQ ID NOs: 13-44, 66-68, and 76-99. The oligonucleotides can be used to amplify the above-described nucleic acid sequences spanning a polymorphic locus.

[0034] The invention further provides oligonucleotide primers for sequencing any of the amplified nucleic acid sequences described herein. In particular embodiments, the oligonucleotides for sequencing the amplified nucleic acid sequences comprise any of SEQ ID NOs: 13-14, 21-22, 25-26, 29-30, 33-34, 37-38, 41-42, 65-66, 76-77, 80-81, 84-85, 88-89, 92-93, and 96-97.

[0035] The probe sequences for each polymorphism disclosed herein were selected to provide optimal melting temperature criteria. Occasionally, a probe directed to the antisense strand was selected because the melting temperature of the antisense probe was more beneficial for the assay conditions used. Nonetheless, the present invention contemplates probe sequences directed to the opposite strand of each allele for each polymorphism. Aside from the probe sequences disclosed herein, one skilled in the art would be able to design appropriate sense and antisense probe sequences to detect which allele is present at the polymorphic locus for each polymorphism of the present invention.

[0036] Specifically, for the rs2541508 (TEKT5 gene) SNP, the alleles at the polymorphic locus were determined to be T/C (reference/variant). Probe sequences directed to the opposing strand at this polymorphic locus would contain A/G (reference/variant) accordingly.

[0037] Specifically, for the rs11853270 (GRINL1A gene) SNP, the alleles at the polymorphic locus were determined to be T/C (reference/variant). Probe sequences directed to the opposing strand at this polymorphic locus would contain A/G (reference/variant) accordingly.

[0038] Specifically, for the rs4774281 (GRINL1A gene) SNP, the alleles at the polymorphic locus were determined to be A/G (reference/variant). Probe sequences directed to the opposing strand at this polymorphic locus would contain T/C (reference/variant) accordingly.

[0039] Specifically, for the rs8037000 (GRINL1A gene) SNP, the alleles at the polymorphic locus were determined to be G/A (reference/variant). Probe sequences directed to the opposing strand at this polymorphic locus would contain C/T (reference/variant) accordingly.

[0040] Specifically, for the rs6493943 (GRINL1A gene) SNP, the alleles at the polymorphic locus were determined to be G/A (reference/variant). Probe sequences directed to the opposing strand at this polymorphic locus would contain C/T (reference/variant) accordingly.

[0041] Specifically, for the rs4774282 (GRINL1A gene) SNP, the alleles at the polymorphic locus were determined to be G/C (reference/variant). Probe sequences directed to the opposing strand at this polymorphic locus would contain C/G (reference/variant) accordingly.

[0042] Specifically, for the SNP2 (GRINL1A gene) SNP, the alleles at the polymorphic locus were determined to be A/G (reference/variant). Probe sequences directed to the opposing strand at this polymorphic locus would contain T/C (reference/variant) accordingly.

[0043] Specifically, for the SNP12 (GRINL1A gene) SNP, the alleles at the polymorphic locus were determined to be G/A (reference/variant). Probe sequences directed to the opposing strand at this polymorphic locus would contain C/T (reference/variant) accordingly.

[0044] Specifically, for the rs17015076 (HSD11B1 gene) SNP, the alleles at the polymorphic locus were determined to be C/T (reference/variant). Probe sequences directed to the opposing strand at this polymorphic locus would contain G/A (reference/variant) accordingly.

[0045] Specifically, for the rs1370627 (CHST10 gene) SNP, the alleles at the polymorphic locus were determined to be G/A (reference/variant). Probe sequences directed to the opposing strand at this polymorphic locus would contain C/T (reference/variant) accordingly.

[0046] Specifically, for the rs6716367 (CHST10 gene) SNP, the alleles at the polymorphic locus were determined to be C/T (reference/variant). Probe sequences directed to the opposing strand at this polymorphic locus would contain G/A (reference/variant) accordingly. Alleles in FIG. 4 are given relative to the opposing strand.

[0047] Specifically, for the rs 7585898 (CHST10 gene) SNP, the alleles at the polymorphic locus were determined to be G/C (reference/variant). Probe sequences directed to the opposing strand at this polymorphic locus would contain C/G (reference/variant) accordingly. Alleles in FIG. 5 are given relative to the opposing strand.

[0048] Specifically, for the rs17024136 (CHST10 gene) SNP, the alleles at the polymorphic locus were determined to be A/G (reference/variant). Probe sequences directed to the opposing strand at this polymorphic locus would contain T/C (reference/variant) accordingly. Alleles in FIG. 6 are given relative to the opposing strand.

[0049] Specifically, for the rs17024129 (CHST10 gene) SNP, the alleles at the polymorphic locus were determined to be C/A (reference/variant). Probe sequences directed to the opposing strand at this polymorphic locus would contain G/T (reference/variant) accordingly. Alleles in FIG. 7 are given relative to the opposing strand.

[0050] Specifically, for the rs7574684 (CHST10 gene) SNP, the alleles at the polymorphic locus were determined to be T/C (reference/variant). Probe sequences directed to the opposing strand at this polymorphic locus would contain A/G (reference/variant) accordingly. Alleles in FIG. 8 are given relative to the opposing strand.

[0051] The invention further provides methods for analyzing nucleic acid from a biological sample obtained from a subject to determine whether the nucleic acid contains a reference or variant nucleotide (allele) at one or more polymorphic loci of a gene or genes, said method comprising the steps of (1) isolating nucleic acid (i.e., DNA or RNA) from a biological sample obtained from a subject, (2) amplifying a nucleotide sequence comprising a polymorphic locus of a gene from the isolated nucleic acid of the biological sample using allele specific oligonucleotides (ASO) and/or non-allele specific oligonucleotides (non-ASO), (3) sequencing the amplified nucleotide sequence comprising the polymorphic locus using allele specific oligonucleotides (ASO) and/or non-allele specific oligonucleotides (non-ASO) and (4) determining whether the sequence of the amplified nucleotide sequence contains a reference or a variant nucleotide (allele) at the polymorphic locus of the gene. In certain embodiments, the described methods are used to determine whether nucleic acid from a biological sample of a subject contains a reference or a variant nucleotide (allele) at a polymorphic locus of a TEKT5, GRINL1A, HSD11B1 or CHST10 gene, including, for example, a polymorphic locus of any of SEQ ID NOs: 1-12, 63-64, and 69-75. In certain embodiments, the methods are used to determine whether nucleic acid from a biological sample of a subject contains a reference (“T”) allele or a variant (“C”) allele at position 26,472 of SEQ ID NO: 63 or 64, respectively. In further embodiments, the methods are used to determine whether nucleic acid from a biological sample of a subject contains a reference (“T”) allele or a variant (“C”) allele at position 87,992 of SEQ ID NO: 1 or 2, a reference (“A”) allele or a variant (“G”) allele at position 89,441 of SEQ ID NO: 1 or 69, a reference (“G”) allele or a variant (“A”) allele at position 89,662 of SEQ ID NO: 1 or 70, a reference (“G”) allele or a variant (“A”) allele at position 89,853 of SEQ ID NO: 1 or 71, a reference (“G”) allele or a variant (“C”) allele at position 94,074 of SEQ ID NO: 1 or 72, a reference (“A”) allele or a variant (“G”) allele at position 87,712 of SEQ ID NO: 1 or 73, a reference (“G”) allele or a variant (“A”) allele at position 93,598 of SEQ ID NO: 1 or 74, and/or a combination thereof of the alleles described herein or otherwise known. In further embodiments, the methods are used to determine whether nucleic acid from a biological sample of a subject contains a reference (“C”) allele or a variant (“T”) allele at position 34,403 of SEQ ID NO: 3 or 4, respectively. In further embodiments, the methods are used to determine whether nucleic acid from a biological sample of a subject contains a reference (“G”) allele or a variant (“A”) allele at position 24,707 of SEQ ID NO: 5 or 6. In other embodiments, the methods are used to determine whether nucleic acid from a biological sample of a subject contains a reference allele (“C”) or variant allele (“T”) at position 34,078 of SEQ ID NO: 5 or 7, a reference allele (“G”) or variant allele (“C”) at position 35,799 of SEQ ID NO: 5 or 8, a reference allele (“A”) or variant allele (“G”) at position 38,709 of SEQ ID NO: 5 or 9, a reference allele (“C”) or a variant allele (“A”) found at position 38,947 of SEQ ID NO: 5 or 10, and/or a reference allele (“T”) or a variant allele (“C”) found at position 41,180 of SEQ ID NO: 5 or 11, and/or a combination thereof of the alleles described herein or otherwise known. In any of the above methods, one or more of the amplification primers described herein can be used, including, for example, in particular embodiments, oligonucleotides comprising any of SEQ ID NOs: 13-44, 65-68, and 76-99. In any of the above methods, one or more of the sequencing primers described herein can be used, including for example in particular embodiments, oligonucleotides comprising any of SEQ ID NOs: 21-22, 25-26, 29-30, 33-34, 37-38, 41-42, 65-66, 76-77, 80-81, 84-85, 88-89, 92-93, and 96-97.

[0052] The above-described methods and oligonucleotides can be used to identify a patient(s) or a patient population(s) that is more likely to have a favorable response to the administration of a therapeutically-effective amount of a DPP-IV inhibitor or a DPP-IV inhibitor in combination with other oral antidiabetic therapy. In certain embodiments, wherein the described method(s) is used to determine whether nucleic acid from a biological sample(s) of a subject(s), patient(s), or patient population(s) contains a reference or variant nucleotide (allele) at one or more polymorphic loci of a TEKT5, GRINL1A, HSD11B1 or CHST10 gene (including, for example, a polymorphic locus found in SEQ ID NOs: 1-12, 63-64, and 69-75), the determination that the nucleic acid contains a reference allele identifies that subject(s), patient(s), or patient population(s) that is more likely to have a favorable response to the administration of a therapeutically-effective amount of a DPP-IV inhibitor or a DPP-IV inhibitor in combination with other oral antidiabetic therapy. In certain other embodiments, wherein the described method(s) is used to determine whether nucleic acid from a biological sample(s) of a subject(s), patient(s), or patient population(s) contains a reference or variant nucleotide (allele) at one or more polymorphic loci of a TEKT5, GRINL1A, HSD11B1 or CHST10 gene (including, for example, a polymorphic locus of SEQ ID NOs: 1-12, 63-64, and 69-75), the determination that the nucleic acid contains a variant allele identifies that subject(s), patient(s), or patient population(s) that is less likely to have a favorable response to the administration of a therapeutically-effective amount of a DPP-IV inhibitor or a DPP-IV inhibitor in combination with other oral antidiabetic therapy.

[0053] The oligonucleotides and methods described herein can also be used to genotype a patient sample(s) to assess whether said sample(s) contains a reference or variant nucleotide (allele) at one or more polymorphic loci and/or the frequency of expression of a reference or variant nucleotide (allele) at one or more polymorphic loci, including a polymorphic locus of a TEKT5, GRINL1A, HSD11B1 or CHST10 gene (for example, a polymorphic locus found in SEQ ID NOs: 1-12, 63-64, and 69-75). In certain embodiments, the method comprises the steps of (1) isolating nucleic acid (i.e., DNA or RNA) from a biological sample obtained from a subject or patient, (2) amplifying a nucleotide sequence comprising a polymorphic locus of a gene from the isolated nucleic acid of the biological sample, and (3) subjecting the amplified nucleotide sequence to an analysis assay, such as a genetic bit analysis (GBA) reaction so as to determine the genotype. In certain embodiments, a nucleotide sequence comprising a polymorphic locus of a TEKT5, GRINL1A, HSD11B1 or CHST10 gene, including, for example, the polymorphic locus found at position 26,472 of SEQ ID NOs: 63 and 64, the polymorphic locus found at position 87,992 of SEQ ID NOs: 1 and 2, the polymorphic locus found at position 89,441 of SEQ ID NOs: 1 and 69, the polymorphic locus found at position 89,662 of SEQ ID NOs: 1 and 70, the polymorphic locus found at position 89,853 of SEQ ID NOs: 1 and 71, the polymorphic locus found at position 94,074 of SEQ ID NOs: 1 and 72, the polymorphic locus found at position 87,712 of SEQ ID NOs: 1 and 73, the polymorphic locus found at position 93,598 of SEQ ID NOs: 1 and 74, the polymorphic locus found at position 34,403 of SEQ ID NOs: 3 and 4, the polymorphic locus found at position 24,707 of SEQ ID NOs: 5 and 6, the polymorphic locus found at position 34,0787 of SEQ ID NOs: 5 and 7, the polymorphic locus found at position 35,799 of SEQ ID NOs: 5 and 8, the polymorphic locus found at position 38,709 of SEQ ID NOs: 5 and 9, the polymorphic locus found at position 38,947 of SEQ ID NOs: 5 and 10, and the polymorphic locus found at position 41,180 of SEQ ID NOs: 5 and 11 is amplified and analyzed.

[0054] The methods and oligonucleotides described herein can be used to determine the association between either a reference or variant allele at one or more polymorphic loci and the likelihood of a favorable response to the administration of a therapeutically-effective amount of a DPP-IV inhibitor or a DPP-IV inhibitor in combination with other oral antidiabetic therapy. In certain embodiments, the method comprises the steps of (1) administering a therapeutically effective amount of a DPP-IV inhibitor or a DPP-IV inhibitor in combination with other oral antidiabetic therapy to one or more subject(s), patient(s), or patient population(s) and measuring the individual response(s) to the DPP-IV inhibitor or a DPP-IV inhibitor in combination with other oral antidiabetic therapy to determine whether the response(s) is a favorable response(s) or a non-response(s), (2) obtaining a biological sample from the subject(s), patient(s), or patient population(s) treated with the DPP-IV inhibitor or a DPP-IV inhibitor in combination with other oral antidiabetic therapy, (3) isolating nucleic acid (i.e., DNA or RNA) from the obtained biological sample(s), (4) amplifying a nucleotide sequence comprising a polymorphic locus of a gene from the isolated nucleic acid, (5) determining whether said amplified nucleotide sequence contains a reference or variant nucleotide (allele), and (6) determining the association between either the reference or variant allele at the polymorphic locus and a favorable response to the administration of a therapeutically-effective amount of a DPP-IV inhibitor or a DPP-IV inhibitor in combination with other oral antidiabetic therapy.

[0055] This method can be used to associate a favorable response to a DPP-IV inhibitor or a DPP-IV inhibitor in combination with other oral antidiabetic therapy to the presence of a reference or variant allele at any polymorphic locus of any gene. In certain embodiments, the polymorphic locus is located in a TEKT5, GRINL1A, HSD11B1 or CHST10 gene (for example, a polymorphic locus found in SEQ ID NOs: 1-12, 63-64, and 69-75). In particular embodiments, the polymorphic locus is located in a TEKT5, GRINL1A, HSD11B1, or CHST10 gene at the nucleotide positions described herein including, for example, the polymorphic locus found at position 26,472 of SEQ ID NOs: 63 and 64, the polymorphic locus found at position 87,992 of SEQ ID NOs: 1 and 2, the polymorphic locus found at position 89,441 of SEQ ID NOs: 1 and 69, the polymorphic locus found at position 89,662 of SEQ ID NOs: 1 and 70, the polymorphic locus found at position 89,853 of SEQ ID NOs: 1 and 71, the polymorphic locus found at position 94,074 of SEQ ID NOs: 1 and 72, the polymorphic locus found at position 87,712 of SEQ ID NOs: 1 and 73, the polymorphic locus found at position 93,598 of SEQ ID NOs: 1 and 74, the polymorphic locus found at position 34,403 of SEQ ID NOs: 3 and 4, the polymorphic locus found at position 24,707 of SEQ ID NOs: 5 and 6, the polymorphic locus found at position 34,0787 of SEQ ID NOs: 5 and 7, the polymorphic locus found at position 35,799 of SEQ ID NOs: 5 and 8, the polymorphic locus found at position 38,709 of SEQ ID NOs: 5 and 9, the polymorphic locus found at position 38,947 of SEQ ID NOs: 5 and 10, and the polymorphic locus found at position 41,180 of SEQ ID NOs: 5 and 11. The response to the administration of a DPP-IV inhibitor or a DPP-IV inhibitor in combination with other oral antidiabetic therapy can be measured using a variety of assays known in the art, including, for example, by measuring the level of glycosylated hemoglobin (HbA1c) levels in blood, measuring the fasting glucose levels, and measuring the levels of AUC glucose. Methods for isolating nucleic acid from a biological sample are well-known in the art. Methods and oligonucleotides for amplifying a nucleotide sequence comprising a polymorphic locus of a gene are described herein and also known in the art. In certain embodiments, the amplification oligonucleotides can comprise, for example, SEQ ID NOs: 13-44, 65-68, and 76-99. Whether an amplified nucleotide sequence contains a reference or variant nucleotide (allele) can be determined by subjecting the amplified nucleotide sequence to an analysis assay, for example, a genetic bit analysis (GBA) reaction. In certain embodiments where DPP-IV inhibitor is administered to one or more patient populations, the method further comprises subjecting the association between the reference or variant allele at the polymorphic locus and a favorable response to the administration of a DPP-IV inhibitor or a DPP-IV inhibitor in combination with other oral antidiabetic therapy to well-known statistical analyses. In further embodiments where DPP-IV inhibitor is administered to one or more patient populations, the method can be used to identify specific ethnic population(s).

[0056] In additional embodiments, the amplified nucleotide sequences produced by the methods of the invention are used to genotype patient samples, such as by genetic bit analysis (GBA). Additional applications for nucleic acid sequences comprising a polymorphic locus as provided by the inventive methods include identifying individual(s) more likely to have a favorable response following administration of a pharmaceutically-acceptable amount of a DPP-IV inhibitor or a DPP-IV inhibitor in combination with other oral antidiabetic therapy. Further applications include using said amplified nucleic acid sequences comprising a polymorphic locus as provided by the methods of this invention to identify ethnic population(s).

[0057] The methods, polynucleotides, and oligonucleotides provided herein can be used to analyze a nucleic acid from one or more individuals to determine whether the reference or variant nucleotide is present at any polymorphic site(s) found in any of the following genes: the TEKT5 gene (e.g., SEQ ID NOs: 63 and 64), the GRINL1A gene (e.g., SEQ ID NOs: 1, 2, and 69-75), the HSD11B1 gene (e.g. SEQ ID NOs: 3 and 4), and the CHST10 gene (e.g. SEQ ID NOs: 5-12). A nucleotide or set of nucleotides occupying the polymorphic locus or loci in any gene can be determined. In certain embodiments, a nucleotide or set of nucleotides occupying the polymorphic locus or loci found in the TEKT5 gene, the GRINL1A gene, the HSD11B1 gene, and the CHST10 gene is determined. This type of analysis can be performed on a number of individuals, who are also tested (previously, concurrently or subsequently) for an increased likelihood of a favorable response to administration of a therapeutically-effective amount of a DPP-IV inhibitor or a DPP-IV inhibitor in combination with other oral antidiabetic therapy. The nucleotide or set of nucleotides present at the polymorphic locus or loci in individuals having a favorable response to the administration of a therapeutically effective amount of a DPP-IV inhibitor or a DPP-IV inhibitor in combination with other oral antidiabetic therapy is determined. The increased likelihood of a favorable response to the administration of a pharmaceutically acceptable amount of a DPP-IV inhibitor or a DPP-IV inhibitor in combination with other oral antidiabetic therapy phenotype is then correlated with the nucleotide or set of nucleotides present at the polymorphic locus or loci in the individuals tested. The invention thus further provides methods for identifying individuals more likely to have a favorable response to administration of a therapeutically-effective amount of a DPP-IV inhibitor or a DPP-IV inhibitor in combination with other oral antidiabetic therapy based on the particular genotype found in the polymorphic locus or loci identified in any gene, including for example, the TEKT5, GRINL1A, HSD11B1, or CHST10 gene, particularly including, for example, the polymorphic locus found at nucleotide position 26,472 of SEQ ID NOs: 63 and 64, the polymorphic locus found at nucleotide position 87,992 of SEQ ID NOs: 1 and 2, the polymorphic locus found at nucleotide position 89,441 of SEQ ID NOs: 1 and 69, the polymorphic locus found at nucleotide position 89,662 of SEQ ID NOs: 1 and 70, the polymorphic locus found at nucleotide position 89,853 of SEQ ID NOs: 1 and 71, the polymorphic locus found at nucleotide position 94,074 of SEQ ID NOs: 1 and 72, the polymorphic locus found at nucleotide position 87,712 of SEQ ID NOs: 1 and 73, the polymorphic locus found at nucleotide position 93,598 of SEQ ID NOs: 1 and 74, the polymorphic locus found at nucleotide position 87,992 of SEQ ID NOs: 1 and 2, the polymorphic locus found at nucleotide position 34,403 of SEQ ID NOs: 3 and 4, the polymorphic locus found at nucleotide position 24,707 of SEQ ID NOs: 5 and 6, the polymorphic locus found at nucleotide position 34,078 of SEQ ID NOs: 5 and 7, the polymorphic locus found at nucleotide position 35,799 of SEQ ID NOs: 5 and 8, the polymorphic locus found at nucleotide position 38,709 of SEQ ID NOs: 5 and 9, the polymorphic locus found at nucleotide position 38,947 of SEQ ID NOs: 5 and 10, or the polymorphic locus found at nucleotide position 41,180 of SEQ ID NOs: 5 and 11. In certain embodiments, methods for identifying individuals more likely to have a favorable response to administration of a therapeutically-effective amount of a DPP-IV inhibitor or a DPP-IV inhibitor in combination with other oral antidiabetic therapy are based on determining the particular genotype found in the polymorphic loci found at one or more of the nucleotide positions 24,707, 34,078, 35,799, 38,709, 38,947 and 41,180 of SEQ ID NOs: 5 and 12.

[0058] The invention provides complementary oligonucleotides capable of hybridizing to the polynucleotides, and fragments thereof, of the invention. Preferably, such antisense oligonucleotides are capable of discriminating between the reference or variant allele of the polynucleotide, preferably at one or more polymorphic sites of said polynucleotide.

[0059] The invention provides siRNA or RNAi oligonucleotides capable of hybridizing to the polynucleotides, and fragments thereof, of the invention. Preferably, such siRNA or RNAi oligonucleotides are capable of discriminating between the reference or variant allele of the polynucleotide, preferably at one or more polymorphic sites of said polynucleotide.

[0060] The invention provides methods for analyzing one or more nucleic acid samples comprising the step of determining the nucleic acid sequence of one or more samples at one or more polymorphic loci in the human TEKT5, GRINL1A, HSD11B1 or CHST10 gene, including, for example, the polymorphic locus found at nucleotide position 26,472 of SEQ ID NOs: 63 and 64, the polymorphic locus found at nucleotide position 87,992 of SEQ ID NOs: 1 and 2, the polymorphic locus found at nucleotide position 89,441 of SEQ ID NOs: 1 and 69, the polymorphic locus found at nucleotide position 89,662 of SEQ ID NOs: 1 and 70, the polymorphic locus found at nucleotide position 89,853 of SEQ ID NOs: 1 and 71, the polymorphic locus found at nucleotide position 94,074 of SEQ ID NOs: 1 and 72, the polymorphic locus found at nucleotide position 87,712 of SEQ ID NOs: 1 and 73, the polymorphic locus found at nucleotide position 93,598 of SEQ ID NOs: 1 and 74, the polymorphic locus found at nucleotide position 34,403 of SEQ ID NOs: 3 and 4, the polymorphic locus found at nucleotide position 24,707 of SEQ ID NOs: 5 and 6, the polymorphic locus found at nucleotide position 34,078 of SEQ ID NOs: 5 and 7, the polymorphic locus found at nucleotide position 35,799 of SEQ ID NOs: 5 and 8, the polymorphic locus found at nucleotide position 38,709 of SEQ ID NOs: 5 and 9, the polymorphic locus found at nucleotide position 38,947 of SEQ ID NOs: 5 and 10, or the polymorphic locus found at nucleotide position 41,180 of SEQ ID NOs: 5 and 11, and the polymorphic loci found at one or more of the nucleotide positions 24,707, 34,078, 35,799, 38,709, 38,947 and 41,180 of SEQ ID NOs: 5 and 12 or the polymorphic loci found at one or more of the nucleotide positions 87,712, 87,992, 89,441, 89,662, 89,853, 93,598, and 94,074 of SEQ ID NOs: 1 and 75, wherein the presence of a reference allele at said one or more polymorphic loci is indicative of a increased likelihood of a favorable response to the administration of a therapeutically-effective amount of a DPP-IV inhibitor or a DPP-IV inhibitor in combination with other oral antidiabetic therapy.

[0061] The invention provides methods for analyzing one or more nucleic acid samples comprising the step of determining the nucleic acid sequence of one or more samples at one or more polymorphic loci in the human TEKT5, GRINL1A, HSD11B1 or CHST10 gene, including, for example, the polymorphic locus found at nucleotide position 26,472 of SEQ ID NOs: 63 and 64, the polymorphic locus found at nucleotide position 87,992 of SEQ ID NOs: 1 and 2, the polymorphic locus found at nucleotide position 89,441 of SEQ ID NOs: 1 and 69, the polymorphic locus found at nucleotide position 89,662 of SEQ ID NOs: 1 and 70, the polymorphic locus found at nucleotide position 89,853 of SEQ ID NOs: 1 and 71, the polymorphic locus found at nucleotide position 94,074 of SEQ ID NOs: 1 and 72, the polymorphic locus found at nucleotide position 87,712 of SEQ ID NOs: 1 and 73, the polymorphic locus found at nucleotide position 93,598 of SEQ ID NOs: 1 and 74, the polymorphic loci found at one or more nucleotide positions 87,712, 87,992, 89,441, 89,662, 89,853, 93,598, and 94,074 of SEQ ID NOs: 1 and 75, wherein the presence of a reference allele at said one or more polymorphic loci is indicative of a increased likelihood of a favorable response to the administration of a therapeutically-effective amount of a DPP-IV inhibitor or a DPP-IV inhibitor in combination with other oral antidiabetic therapy, the polymorphic locus found at nucleotide position 34,403 of SEQ ID NOs: 3 and 4, and the polymorphic locus found at nucleotide position 24,707 of SEQ ID NOs: 5 and 6, or the polymorphic locus found at nucleotide position 34,078 of SEQ ID NOs: 5 and 7, or the polymorphic locus found at nucleotide position 35,799 of SEQ ID NOs: 5 and 8, or the polymorphic locus found at nucleotide position 38,709 of SEQ ID NOs: 5 and 9, or the polymorphic locus found at nucleotide position 38,947 of SEQ ID NOs: 5 and 10, or the polymorphic locus found at nucleotide position 41,180 of SEQ ID NOs: 5 and 11, the polymorphic loci found at one or more nucleotide positions 24,707, 34,078, 35,799, 38,709, 38,947 and 41,180 of SEQ ID NO: 5 and 12, wherein the presence of the variant allele at said one or more polymorphic loci is indicative of an decreased likelihood of a favorable response to the administration of a therapeutically-effective amount of a DPP-IV inhibitor or a DPP-IV inhibitor in combination with other oral antidiabetic therapy.

[0062] The invention further provides methods for constructing haplotypes using the isolated nucleic acids of any of SEQ ID NOs: 1-12, 63-64, and 69-75, or elsewhere herein, comprising the step of grouping at least two of the isolated nucleic acids. The invention further provides methods for constructing haplotypes further comprising the step of using said haplotypes to identify an individual more likely to have a favorable response to the administration of a therapeutically-effective amount of a DPP-IV inhibitor or a DPP-IV inhibitor in combination with other oral antidiabetic therapy phenotype, and correlating the presence of such a phenotype with said haplotype.

[0063] The invention further provides a library of nucleic acids, each of which comprises one or more polymorphic positions within a gene encoding the human TEKT5, GRINL1A, HSD11B1 or CHST10 protein, wherein said polymorphic positions are selected from the polymorphic positions found in SEQ ID NOs: 1-12, 63-64, and 69-75. In certain embodiments, the polymorphic positions are selected from position 26,472 in SEQ ID NOs: 63 and 64; position 87,992 in SEQ ID NOs: 1 and 2; position 87,712 in SEQ ID NOs: 1 and 73; position 89,441 in SEQ ID NOs: 1 and 69; position 89,662 in SEQ ID NOs: 1 and 70; position 89,853 in SEQ ID NOs: 1 and 71; position 93,598 in SEQ ID NOs: 1 and 74; position 94,074 in SEQ ID NOs: 1 and 72; position 34,403 in SEQ ID NOs: 3 and 4; position 24,707 in SEQ ID NOs: 5 and 6, position 34,078 in SEQ ID NOs: 5 and 7, position 35,799 in SEQ ID NOs: 5 and 8, position 38,709 in SEQ ID NOs: 5 and 9, position 38,947 in SEQ ID NOs: 5 and 10, and position 41,180 in SEQ ID NOs: 5 and 11. In other embodiments, the invention provides a library of nucleic acids comprising the complementary sequences of those sequences comprising one or more polymorphic loci found in a human TEKT5, GRINL1A, HSD11B1 or CHST10 gene, including, for example, the complementary sequences of SEQ ID NOs: 1-12, 63-64, and 69-77 and, in particular, the complementary sequences of those sequences comprising the polymorphic positions selected from position 26,472 in SEQ ID NOs: 63 and 64; position 87,992 in SEQ ID NOs: 1 and 2, position 89,441 in SEQ ID NOs: 1 and 69, position 89,662 in SEQ ID NOs: 1 and 70, position 89,853 in SEQ ID NOs: 1 and 71, position 94,074 in SEQ ID NOs: 1 and 72, position 87,712 in SEQ ID NOs: 1 and 73, position 93,598 in SEQ ID NOs: 1 and 74; position 34,403 in SEQ ID NOs: 3 and 4; position 24,707 in SEQ ID NOs: 5 and 6, position 34,078 in SEQ ID NOs: 5 and 7, position 35,799 in SEQ ID NOs: 5 and 8, position 38,709 in SEQ ID NOs: 5 and 9, position 38,947 in SEQ ID NOs: 5 and 10, and position 41,180 in SEQ ID NOs: 5 and 11. In other embodiments, the invention provides a library of nucleic acids comprising fragments of those sequences comprising one or more polymorphic loci found in a human TEKT5, GRINL1A, HSD11B1 or CHST10 gene, including, for example, polymorphic positions selected from position 26,472 in SEQ ID NOs: 63 and 64; position 87,992 in SEQ ID NOs: 1 and 2, position 89,441 in SEQ ID NOs: 1 and 69, position 89,662 in SEQ ID NOs: 1 and 70, position 89,853 in SEQ ID NOs: 1 and 71, position 94,074 in SEQ ID NOs: 1 and 72, position 87,712 in SEQ ID NOs: 1 and 73, position 93,598 in SEQ ID NOs: 1 and 74; position 34,403 in SEQ ID NOs: 3 and 4; position 24,707 in SEQ ID NOs: 5 and 6, position 34,078 in SEQ ID NOs: 5 and 7, position 35,799 in SEQ ID NOs: 5 and 8, position 38,709 in SEQ ID NOs: 5 and 9, position 38,947 in SEQ ID NOs: 5 and 10, and position 41,180 in SEQ ID NOs: 5 and 11, as well as the complementary sequences thereof.

[0064] The invention further provides kits for identifying a subject or patient more likely to have a favorable response to the administration of a therapeutically-effective amount of a DPP-IV inhibitor or a DPP-IV inhibitor in combination with other oral antidiabetic therapy, wherein said kit comprises oligonucleotides capable of identifying the nucleotide residing at one or more polymorphic loci of the human TEKT5, GRINL1A, HSD11B1 or CHST10 gene, wherein the presence of the reference allele at said one or more polymorphic loci is indicative of an increased likelihood of a favorable response to the administration of a therapeutically-effective amount of a DPP-IV inhibitor or a DPP-IV inhibitor in combination with other oral antidiabetic therapy and/or wherein the presence of the variant allele at said one or more polymorphic loci is indicative of a decreased likelihood of a favorable response to the administration of a therapeutically-effective amount of a DPP-IV inhibitor or a DPP-IV inhibitor in combination with other oral antidiabetic therapy. In certain embodiments, the kit comprises oligonucleotides primers that can amplify a portion of the reference and/or variant sequences comprising at least one polymorphic locus of the human TEKT5, GRINL1A, HSD11B1 or CHST10 gene, for example, oligonucleotide primers that amplify sequence across the polymorphic locus. In further embodiments, the kit additionally comprises oligonucleotides that can be used to sequence said amplified sequence(s).

[0065] In particular embodiments, the kit comprises oligonucleotides that hybridize to a nucleic acid sequence that spans a polymorphic locus found in SEQ ID NOs: 1, 3, 5, or 63, including, for example, the polymorphic locus containing a reference allele at nucleotide position 26,472 of SEQ ID NO: 63; the polymorphic locus containing a reference allele at nucleotide positions 87,712, 87,992, 89,441, 89,662, 89,853, 93,598, and 94,074 of SEQ ID NO: 1, the polymorphic locus containing a reference allele at nucleotide position 34,403 of SEQ ID NO: 3, and the polymorphic locus containing a reference allele at nucleotide positions 24,707, 34,078, 35,799, 38,709, 38,947, and 41,180 of SEQ ID NO: 5, as well as the complementary sequences thereof.

[0066] In certain other embodiments, the invention provides oligonucleotides that hybridize to a nucleic acid sequence that spans a polymorphic locus found in SEQ ID NOs: 2, 4, 6-11, or 64 including, for example, the polymorphic locus containing a variant allele at nucleotide position 26,472 of SEQ ID NO: 64; the polymorphic locus containing a variant allele at nucleotide positions 87,712, 87,992, 89,441, 89,662, 89,853, 93,598, and 94,074 of SEQ ID NOs: 2 and 69-74, the polymorphic locus containing a variant allele at nucleotide position 34,403 of SEQ ID NO: 4, and the polymorphic locus containing a variant allele at nucleotide positions 24,707, 34,078, 35,799, 38,709, 38,947, and 41,180 of SEQ ID NOs: 6-11, respectively, as well as the complementary sequences thereof. In other particular embodiments, the oligonucleotides comprise any of SEQ ID NOs: 13-44, 65-68, and 78-105.

[0067] In certain embodiments, the oligonucleotides of the kit hybridize immediately adjacent to one or more of the described polymorphic positions or hybridize to said polymorphic positions such that the central position of the primer aligns with the polymorphic position of said gene. For example, in specific embodiments, the kit comprises the oligonucleotides of SEQ ID NOs: 23-24, 27-28, 31-32, 35-36, 39-40, 43-44, 78-79, 82-83, 86-87, 90-91, 94-95, 98-99, and 102-103.

[0068] The invention further provides methods for determining whether an individual will be more likely to have a favorable response to the administration of a therapeutically-effective amount of a DPP-IV inhibitor or a DPP-IV inhibitor in combination with other oral antidiabetic therapy comprising the step of determining the nucleotide present within at least one or more nucleic acid sequence(s) from an individual to be assessed at one or more polymorphic position(s) of the human TEKT5 gene sequence selected from SEQ ID NO: 63 and/or SEQ ID NO: 64, wherein the presence of the reference nucleotide at the one or more polymorphic position(s) indicates that the individual is more likely to have a favorable response to the administration of a therapeutically-effective amount of a DPP-IV inhibitor or a DPP-IV inhibitor in combination with other oral antidiabetic therapy as compared to an individual having the variant allele at said polymorphic position(s). In certain embodiments, the polymorphic position of the human TEKT5 gene sequence is at nucleotide position 26,472 of SEQ ID NO: 63 and/or SEQ ID NO: 64, wherein the presence of the reference nucleotide at nucleotide position 26,472 indicates that the individual more likely to have a favorable response to the administration of a therapeutically-effective amount of a DPP-IV inhibitor or a DPP-IV inhibitor in combination with other oral antidiabetic therapy as compared to an individual having the variant allele at that polymorphic position.

[0069] The invention further provides methods for determining whether an individual is more likely to have a favorable response to the administration of a therapeutically-effective amount of a DPP-IV inhibitor or a DPP-IV inhibitor in combination with other oral antidiabetic therapy comprising the step of determining the nucleotide present within at least one or more nucleic acid sequence(s) from an individual to be assessed at one or more polymorphic position(s) of the human TEKT5 gene sequence selected from SEQ ID NO: 63 and/or SEQ ID NO: 64, wherein the presence of the variant nucleotide at the one or more polymorphic position(s) indicates that the individual is less likely to have a favorable response to the administration of a therapeutically-effective amount of a DPP-IV inhibitor or a DPP-IV inhibitor in combination with other oral antidiabetic therapy as compared to an individual having the reference allele at said polymorphic position(s). In certain embodiments, the polymorphic position of the human TEKT5 gene sequence is at nucleotide position 26,472 of SEQ ID NO: 63 and/or SEQ ID NO: 64, wherein the presence of the variant nucleotide at nucleotide position 26,472 indicates that the individual is less likely to have a favorable response to the administration of a therapeutically-effective amount of a DPP-IV inhibitor or a DPP-IV inhibitor in combination with other oral antidiabetic therapy as compared to an individual having the reference allele at that polymorphic position.

[0070] The invention further provides methods for determining the likelihood that an individual will have a favorable response to the administration of a therapeutically-effective amount of a DPP-IV inhibitor or a DPP-IV inhibitor in combination with other oral antidiabetic therapy comprising the step of determining the nucleotide present within at least one or more nucleic acid sequence(s) from an individual to be assessed at one or more polymorphic position(s) of the human GRINL1A gene sequence selected from SEQ ID NO: 1, SEQ ID NO: 2, SEQ ID NO: 69, SEQ ID NO: 70, SEQ ID NO: 71, SEQ ID NO: 72, SEQ ID NO: 73, SEQ ID NO: 74, and SEQ ID NO: 75, wherein the presence of the reference nucleotide at the one or more polymorphic position(s) indicates that the individual is more likely to have a favorable response to the administration of a therapeutically-effective amount of a DPP-IV inhibitor or a DPP-IV inhibitor in combination with other oral antidiabetic therapy as compared to an individual having the variant allele at said polymorphic position(s). In certain embodiments, the polymorphic position of the human GRINL1A gene sequence is at nucleotide position 87,992 of SEQ ID NOs: 1, 2 and/or 75, at nucleotide position 89,441 of SEQ ID NOs: 1, 69 and/or 75, at nucleotide position 89,662 of SEQ ID NOs: 1, 70 and/or 75, at nucleotide position 89,853 of SEQ ID NOs: 1, 71 and/or 75, at nucleotide position 94,074 of SEQ ID NOs: 1, 72 and/or 75, at nucleotide position 87,712 of SEQ ID Nos: 1, 73, and/or 75, or at nucleotide position 93,598 of SEQ ID NOs: 1, 74 and/or 75 wherein the presence of the reference nucleotide at nucleotide position(s) 87,712, 87,992, 89,441, 89,662, 89,853, 93,598, and/or 94,074 indicates that the individual is more likely to have a favorable response to the administration of a therapeutically-effective amount of a DPP-IV inhibitor or a DPP-IV inhibitor in combination with other oral antidiabetic therapy as compared to an individual having the variant allele at that polymorphic position.

[0071] The invention further provides methods for determining the likelihood that an individual will have a favorable response to the administration of a therapeutically-effective amount of a DPP-IV inhibitor or a DPP-IV inhibitor in combination with other oral antidiabetic therapy comprising the step of determining the nucleotide present within at least one or more nucleic acid sequence(s) from an individual to be assessed at one or more polymorphic position(s) of the human GRINL1A gene sequence selected from SEQ ID NO: 1 and/or SEQ ID NO: 2, wherein the presence of the variant nucleotide at the one or more polymorphic position(s) indicates that the individual is less likely to have a favorable response to the administration of a therapeutically-effective amount of a DPP-IV inhibitor or a DPP-IV inhibitor in combination with other oral antidiabetic therapy as compared to an individual having the reference allele at said polymorphic position(s). In certain embodiments, the polymorphic position of the human GRINL1A gene sequence is at nucleotide position 87,992 of SEQ ID NOs: 1, 2 and/or 75, at nucleotide position 89,441 of SEQ ID NOs: 1, 69 and/or 75, at nucleotide position 89,662 of SEQ ID NOs: 1, 70 and/or 75, at nucleotide position 89,853 of SEQ ID NOs: 1, 71 and/or 75, at nucleotide position 94,074 of SEQ ID NOs: 1, 72 and/or 75, at nucleotide position 87,712 of SEQ ID Nos: 1, 73, and/or 75, or at nucleotide position 93,598 of SEQ ID NOs: 1, 74 and/or 75, wherein the presence of the variant nucleotide at nucleotide position(s) 87,712, 87,992, 89,441, 89,662, 89,853, 93,598, and/or 94,074 indicates that the individual is less likely to have a favorable response to the administration of a therapeutically-effective amount of a DPP-IV inhibitor or a DPP-IV inhibitor in combination with other oral antidiabetic therapy as compared to an individual having the reference allele at that polymorphic position.

[0072] The invention further provides methods for determining the likelihood that an individual will have a favorable response to the administration of a therapeutically-effective amount of a DPP-IV inhibitor or a DPP-IV inhibitor in combination with other oral antidiabetic therapy comprising the step of determining the nucleotide present within at least one or more nucleic acid sequence(s) from an individual to be assessed at one or more polymorphic position(s) of the human HSD11B1 gene sequence selected from SEQ ID NO: 3 and/or SEQ ID NO: 4, wherein the presence of the reference nucleotide at the one or more polymorphic position(s) indicates that the individual is more likely to have a favorable response to the administration of a therapeutically-effective amount of a DPP-IV inhibitor or a DPP-IV inhibitor in combination with other oral antidiabetic therapy as compared to an individual having the variant allele at said polymorphic position(s). In certain embodiments, the polymorphic position of the human HSD11B1 gene sequence is at nucleotide position 34,403 of SEQ ID NO: 3 and/or SEQ ID NO: 4, wherein the presence of the reference nucleotide at nucleotide position 34,403 indicates that the individual is more likely to have a favorable response to the administration of a therapeutically-effective amount of a DPP-IV inhibitor or a DPP-IV inhibitor in combination with other oral antidiabetic therapy as compared to an individual having the variant allele at that polymorphic position.

[0073] The invention further provides methods for determining the likelihood that an individual will have a favorable response to the administration of a therapeutically-effective amount of a DPP-IV inhibitor or a DPP-IV inhibitor in combination with other oral antidiabetic therapy comprising the step of determining the nucleotide present within at least one or more nucleic acid sequence(s) from an individual to be assessed at one or more polymorphic position(s) of the human HSD11B1 gene sequence selected from SEQ ID NO: 3 and/or SEQ ID NO: 4, wherein the presence of the variant nucleotide at the one or more polymorphic position(s) indicates that the individual is more likely to have a favorable response to the administration of a therapeutically-effective amount of a DPP-IV inhibitor or a DPP-IV inhibitor in combination with other oral antidiabetic therapy as compared to an individual having the reference allele at said polymorphic position(s). In certain embodiments, the polymorphic position of the human HSD11B1 gene sequence is at nucleotide position 34,403 of SEQ ID NO: 3 and/or SEQ ID NO: 4, wherein the presence of the variant nucleotide at nucleotide position 34,403 indicates that the individual is less likely to have a favorable response to the administration of a therapeutically-effective amount of a DPP-IV inhibitor or a DPP-IV inhibitor in combination with other oral antidiabetic therapy as compared to an individual having the reference allele at that polymorphic position.

[0074] The invention further provides methods for determining the likelihood that an individual will have a favorable response to the administration of a therapeutically-effective amount of a DPP-IV inhibitor or a DPP-IV inhibitor in combination with other oral antidiabetic therapy comprising the step of determining the nucleotide present within at least one or more nucleic acid sequence(s) from an individual to be assessed at one or more polymorphic position(s) of the human CHST10 gene sequence selected from SEQ ID NO: 5, SEQ ID NO: 6, SEQ ID NO: 7, SEQ ID NO: 8, SEQ ID NO: 9, SEQ ID NO: 10, SEQ ID NO: 11 and SEQ ID NO: 12, wherein the presence of the reference nucleotide at the one or more polymorphic position(s) indicates that the individual is more likely to have a favorable response to the administration of a therapeutically-effective amount of a DPP-IV inhibitor or a DPP-IV inhibitor in combination with other oral antidiabetic therapy as compared to an individual having the variant allele at said polymorphic position(s). In certain embodiments, the polymorphic position of the human CHST10 gene sequence is at nucleotide position 24,707 of SEQ ID NOs: 5, 6 and/or 12, at nucleotide position 34,078 of SEQ ID NOs: 5, 7 and/or 12, at nucleotide position 35,799 of SEQ ID NOs: 5, 8 and/or 12, at nucleotide position 38,709 of SEQ ID NOs: 5, 9 and/or 12, at nucleotide position 38,947 of SEQ ID NOs: 5, 10 and/or 12, or at nucleotide position 41,180 of SEQ ID NOs: 5, 11 and/or 12 wherein the presence of the reference nucleotide at nucleotide position 24,707, 34,078, 35,799, 38,709, 38,947, and/or 41,180 indicates that the individual is more likely to have a favorable response to the administration of a therapeutically-effective amount of a DPP-IV inhibitor or a DPP-IV inhibitor in combination with other oral antidiabetic therapy as compared to an individual having the variant allele at that polymorphic position.

[0075] The invention further provides methods for determining the likelihood that an individual will have a favorable response to the administration of a therapeutically-effective amount of a DPP-IV inhibitor or a DPP-IV inhibitor in combination with other oral antidiabetic therapy comprising the step of determining the nucleotide present within at least one or more nucleic acid sequence(s) from an individual to be assessed at one or more polymorphic position(s) of the human CHST10 gene sequence selected from SEQ ID NO: 5 and/or SEQ ID NO: 6, wherein the presence of the variant nucleotide at the one or more polymorphic position(s) indicates that the individual is less likely to have a favorable response to the administration of a therapeutically-effective amount of a DPP-IV inhibitor or a DPP-IV inhibitor in combination with other oral antidiabetic therapy as compared to an individual having the reference allele at said polymorphic position(s). In certain embodiments, the polymorphic position of the human CHST10 gene sequence is at nucleotide position 24,707 of SEQ ID NOs: 5, 6 and/or 12, at nucleotide position 34,078 of SEQ ID NOs: 5, 7, and/or 12, at nucleotide position 35,799 of SEQ ID NOs: 5, 8, and/or 12, at nucleotide position 38,709 of SEQ ID NOs: 5, 9, and/or 12, at nucleotide position 38,947 of SEQ ID NOs: 5, 10, and/or 12, or at nucleotide position 41,180 of SEQ ID NOs: 5, 11, and/or 12, wherein the presence of the variant nucleotide at nucleotide position 24,707, 34,078, 35,799, 38,709, 38,947, and/or 41,180 indicates that the individual is less likely to have a favorable response to the administration of a therapeutically-effective amount of a DPP-IV inhibitor or a DPP-IV inhibitor in combination with other oral antidiabetic therapy as compared to an individual having the reference allele at that polymorphic position.

[0076] Specific embodiments of the present invention will become evident from the following more detailed description of certain preferred embodiments and the claims.

### BRIEF DESCRIPTION OF THE DRAWINGS

[0077] FIG. 1 shows a statistical association between human GRINL1A SNP (nucleotide position 87,992 of SEQ ID NOs: 1 and 2) alleles “T” (reference) and “C” (variant) with a likelihood of a favorable response to the administration of a therapeutically-effective amount of a DPP-IV inhibitor. Results are shown in terms of incidence of each genotype residing in a patient that was part of non-responder (NR) and super responder (SR) DPP-IV inhibitor groups. As shown, homozygous “T” allele patients (“T/T”) are more likely to have a favorable response to the administration of a therapeutically-effective amount of a DPP-IV inhibitor than patients having the heterozygous allele (“T/C”) or homozygous “C” allele (“C/C”). P-values from the genotype association test are shown. Overall P-values value was calculated by pooling data from both the Phase II and Phase III studies.

[0078] FIG. 2 shows a statistical association between human HSD11B1 SNP (nucleotide position 34,403 of SEQ ID NOs: 3 and 4) alleles “C” (reference) and “T” (variant) with a likelihood of a favorable response to the administration of a therapeutically-effective amount of a DPP-IV inhibitor. Results are shown in terms of fold incidence of each genotype residing in a patient that was part of non-responder (NR) and super responder (SR) DPP-IV inhibitor groups. As shown, homozygous “C” allele patients (“C/C”) are more likely to have a favorable response to the administration of a therapeutically-effective amount of a DPP-IV inhibitor than patients having the heterozygous allele (“C/T”) or homozygous “T” allele (“T/T”). P-values from the genotype association test are shown. Overall P-values value was calculated by pooling data from both the Phase II and Phase III studies.

[0079] FIG. 3 shows a statistical association between human CHST10 SNP (nucleotide position 24,707 of SEQ ID NOs: 5 and 6) alleles “G” (reference) and “A” (variant) with a likelihood of a favorable response to the administration of a therapeutically-effective amount of a DPP-IV inhibitor. Results are shown in terms of fold incidence of each genotype residing in a patient that was part of non-responder and super responder DPP-IV inhibitor groups. As shown, homozygous “G” allele patients (“G/G”) are more likely to have a favorable response to the administration of a therapeutically-effective amount of a DPP-IV inhibitor than patients having the heterozygous allele (“G/A”) or homozygous “A” allele (“A/A”). P-values from the genotype association test are shown. Overall P-values value was calculated by pooling data from both the Phase II and Phase III studies.

[0080] FIG. 4 shows a statistical association between human CHST10 SNP (nucleotide position 34,078 of SEQ ID NOs: 5 and 7) alleles “C” (reference) and “T” (variant) with a likelihood of a favorable response to the administration of a therapeutically-effective amount of a DPP-IV inhibitor. Results are shown in terms of fold incidence of each genotype residing in a patient that was part of non-responder and good responder DPP-IV inhibitor groups. As shown, homozygous “C” allele patients (“C/C”) are more likely to have a favorable response to the administration of a therapeutically-effective amount of a DPP-IV inhibitor than patients having the heterozygous allele (“C/T”) or homozygous “T” allele (“T/T”). P-values from the genotype association test are shown. Overall P-values value was calculated by pooling data from both the Phase II and Phase III studies.

[0081] FIG. 5 shows a statistical association between human CHST10 SNP (nucleotide position 35,799 of SEQ ID NOs: 5 and 8) alleles “G” (reference) and “C” (variant) with a likelihood of a favorable response to the administration of a therapeutically-effective amount of a DPP-IV inhibitor. Results are shown in terms of fold incidence of each genotype residing in a patient that was part of non-responder and super responder DPP-IV inhibitor groups. As shown, homozygous “G” allele patients (“G/G”) are more likely to have a favorable response to the administration of a therapeutically-effective amount of a DPP-IV inhibitor than patients having the heterozygous allele (“G/C”) or homozygous “C” allele homozygous patients (“C/C”). P-values from the genotype association test are shown. Overall P-values value was calculated by pooling data from both the Phase II and Phase III studies.

[0082] FIG. 6 shows a statistical association between human CHST10 SNP (nucleotide position 38,709 of SEQ ID NOs: 5 and 9) alleles “A” (reference) and “G” (variant) with a likelihood of a favorable response to the administration of a therapeutically-effective amount of a DPP-IV inhibitor. Results are shown in terms of fold incidence of each genotype residing in a patient that was part of non-responder and super responder DPP-IV inhibitor groups. As shown, homozygous “A” allele patients (“A/A”) are more likely to have a favorable response to the administration of a therapeutically-effective amount of a DPP-IV inhibitor than patients having the heterozygous allele (“A/G”) or homozygous “G” allele (“G/G”). P-values from the genotype association test are shown. Overall P-values value was calculated by pooling data from both the Phase II and Phase III studies.

[0083] FIG. 7 shows a statistical association between human CHST10 SNP (nucleotide position 38,947 of SEQ ID NOs: 5 and 10) alleles “C” (reference) and “A” (variant) with a likelihood of a favorable response to the administration of a therapeutically-effective amount of a DPP-IV inhibitor. Results are shown in terms of fold incidence of each genotype residing in a patient that was part of non-responder and super responder DPP-IV inhibitor groups. As shown, homozygous “C” allele patients (“C/C”) are more likely to have a favorable response to the administration of a therapeutically-effective amount of a DPP-IV inhibitor than patients having the heterozygous allele (“C/A”) or homozygous “A” allele (“A/A”). P-values from the genotype association test are shown. Overall P-values value was calculated by pooling data from both the Phase II and Phase III studies.

[0084] FIG. 8 shows a statistical association between human CHST10 SNP (nucleotide position 41,180 of SEQ ID NOs: 5 and 11) alleles “T” (reference) and “C” (variant) with a likelihood of a favorable response to the administration of a therapeutically-effective amount of a DPP-IV inhibitor. Results are shown in terms of fold incidence of each genotype residing in a patient that was part of non-responder and super responder DPP-IV inhibitor groups. As shown, homozygous “T” allele patients (“T/T”) are more likely to have a favorable response to the administration of a therapeutically-effective amount of a DPP-IV inhibitor than patients having the heterozygous allele (“T/C”) or homozygous “C” allele (“C/C”). P-values from the genotype association test are shown. Overall P-values value was calculated by pooling data from both the Phase II and Phase III studies.

[0085] FIG. 9 shows a statistical association between human GRINL1A SNP (nucleotide position 87,992 of SEQ ID NOs: 1 and 2) alleles “T” (WT, reference) and “C” (SNP carriers, variant) with a likelihood of a favorable response to the administration of a therapeutically-effective amount of a DPP-IV inhibitor. The response to DPP-IV inhibitor is assessed by measuring fasting glycosylated hemoglobin (HbA1c) levels in blood. Results are shown in terms of mean change in HbA1c levels for each genotype patient. As shown, reference carriers have a higher reduction in mean glycosylated hemoglobin than SNP variant carriers in response to saxagliptin treatment.

[0086] FIG. 10 shows a statistical association between human GRINL1A SNP (nucleotide position 87,992 of SEQ ID NOs: 1 and 2) alleles “T” (WT, reference) and “C” (SNP carriers, variant) with a likelihood of a favorable response to the administration of a therapeutically-effective amount of a DPP-IV inhibitor. The response to DPP-IV inhibitor is assessed by measuring fasting blood glucose levels in blood. Results are shown in terms of mean change in fasting glucose levels for each genotype patient. As shown, reference carriers have a higher reduction in mean fasting glucose levels than SNP carriers in response to saxagliptin treatment.

[0087] FIG. 11 shows a statistical association between human GRINL1A (nucleotide position 87,992 of SEQ ID NOs: 1 and 2) alleles “T” (WT, reference) and “C” (SNP carriers, variant) with a likelihood of a favorable response to the administration of a therapeutically-effective amount of a DPP-IV inhibitor. The response to DPP-IV inhibitor is assessed by measuring AUC Glucose levels in blood. Results are shown in terms of mean change in AUC Glucose levels for each genotype patient. As shown, reference carriers have a higher reduction in AUC Glucose levels than SNP carriers in response to saxagliptin treatment.

[0088] FIG. 12 shows a statistical association between human HSD11B1 SNP (nucleotide position 34,403 of SEQ ID NOs: 3 and 4) alleles “C” (WT, reference) and “T” (SNP carriers, variant) with a likelihood of a favorable response to the administration of a therapeutically-effective amount of a DPP-IV inhibitor. The response to DPP-IV inhibitor is assessed by measuring glycosylated hemoglobin (HbA1c) levels in blood. Results are shown in terms of mean change in HbA1c levels for each genotype patient. As shown, reference carriers have a higher reduction in mean glycosylated hemoglobin than SNP carriers in response to saxagliptin treatment.

[0089] FIG. 13 shows a statistical association between human CHST10 SNP (nucleotide position 24,707 of SEQ ID NOs: 5 and 6) alleles “G” (WT, reference) and “A” (SNP carriers, variant) with a likelihood of a favorable response to the administration of a therapeutically-effective amount of a DPP-IV inhibitor. The response to DPP-IV inhibitor is assessed by measuring glycosylated hemoglobin (HbA1c) levels in blood. Results are shown in terms of mean change in HbA1c levels for each genotype patient. As shown, reference carriers have a higher reduction in mean glycosylated hemoglobin than SNP carriers in response to saxagliptin treatment.

[0090] FIG. 14 shows a statistical association between human CHST10 SNP (nucleotide position 34,078 of SEQ ID NOs: 5 and 7) alleles “C” (WT, reference) and “T” (SNP carriers, variant) with a likelihood of a favorable response to the administration of a therapeutically-effective amount of a DPP-IV inhibitor by measuring mean change in HbA1c levels in blood. As shown, reference carriers have a higher reduction in mean glycosylated hemoglobin than SNP carriers in response to saxagliptin treatment.

[0091] FIG. 15 shows a statistical association between human CHST10 SNP (nucleotide position 35,799 of SEQ ID NOs: 5 and 8) alleles “G” (WT, reference) and “C” (SNP carriers, variant) with a likelihood of a favorable response to the administration of a therapeutically-effective amount of a DPP-IV inhibitor by measuring mean change in HbA1c levels in blood. As shown, reference carriers have a higher reduction in mean glycosylated hemoglobin than SNP carriers in response to saxagliptin treatment.

[0092] FIG. 16 shows a statistical association between human CHST10 SNP (nucleotide position 38,709 of SEQ ID NOs: 5 and 9) alleles “A” (WT, reference) and “G” (SNP carriers, variant) with a likelihood of a favorable response to the administration of a therapeutically-effective amount of a DPP-IV inhibitor by measuring mean change in HbA1c levels in blood. As shown, reference carriers have a higher reduction in mean glycosylated hemoglobin than SNP carriers in response to saxagliptin treatment.

[0093] FIG. 17 shows a statistical association between human CHST10 SNP (nucleotide position 38,947 of SEQ ID NOs: 5 and 10) alleles “C” (WT, reference) and “A” (SNP carriers, variant) with a likelihood of a favorable response to the administration of a therapeutically-effective amount of a DPP-IV inhibitor by measuring mean change in HbA1c levels in blood. As shown, reference carriers have a higher reduction in mean glycosylated hemoglobin than SNP carriers in response to saxagliptin treatment.

[0094] FIG. 18 shows a statistical association between human CHST10 SNP (nucleotide position 41,180 of SEQ ID NOs: 5 and 11) alleles “T” (WT, reference) and “C” (SNP carriers, variant) with a likelihood of a favorable response to the administration of a therapeutically-effective amount of a DPP-IV inhibitor by measuring mean change in HbA1c levels in blood. As shown, reference carriers have a higher reduction in mean glycosylated hemoglobin than SNP carriers in response to saxagliptin treatment.

[0095] FIG. 19 shows a statistical association between human TEKT5 SNP (nucleotide position 26,472 of SEQ ID NOs: 63 and 64) alleles “T” (reference) and “C” (variant) with a likelihood of a favorable response to the administration of a therapeutically-effective amount of a DPP-IV inhibitor. Results are shown as 95% confidence intervals of the mean HBA1C, both observed and as estimated by an ANCOVA model. The model-adjusted week 12 HbA1C values were compared between wild-type homozygous (genotype 0/0) and heterozygous (genotype 0/1) individuals on combination treatment. These values were found to be significantly different (Contrast p-value=0.0042). This result and the pattern displayed in the plot indicate a a significant association between the wild-type homozygous genotype and lower HbA1C on treatment.

[0096] FIG. 20 shows a statistical association between human GRINL1A SNP (nucleotide position 87,992 of SEQ ID NOs: 1, 2 and 75) alleles “T” (reference) and “C” (variant) with a likelihood of a favorable response to the administration of a therapeutically-effective amount of a DPP-IV inhibitor or a DPP-IV inhibitor in combination with other oral antidiabetic therapy. In the plot, “Placebo” denotes Metformin arm, and “Drug” denotes Combination arm. The model-adjusted week 24 HbA1C values were compared between wild-type homozygous (genotype 0/0) and heterozygous (genotype 0/1) individuals on combination treatment. These values were found to be significantly different (Contrast p-value=0.0536). This result and the pattern displayed in the plot indicate a likely association between the wild-type homozygous genotype and lower HbA1C on combination treatment, just outside our criteria for significance at 0.05.

[0097] FIG. 21 shows a statistical association between human GRINL1A SNP (nucleotide position 87,992 of SEQ ID NOs: 1, 2 and 75) alleles “T” (reference) and “C” (variant) with a likelihood of a favorable response to the administration of a therapeutically-effective amount of a DPP-IV inhibitor or a DPP-IV inhibitor in combination with other oral antidiabetic therapy. In the plot, “Placebo” denotes Glyburide arm, and “Drug” denotes Combination arm. The model-adjusted week 24 HbA1C values were compared between wild-type homozygous (genotype 0/0) and heterozygous (genotype 0/1) individuals on combination treatment. These values were found to be significantly different (Contrast p-value=0.0571). This result and the pattern displayed in the plot indicate a likely association between the wild-type homozygous genotype and lower HbA1C on combination treatment, just outside our criteria for significance at 0.05.

### DETAILED DESCRIPTION OF THE INVENTION

[0098] As used herein, the skilled worker will understand the meaning of the following terms:

[0099] Glutamate Receptor, Ionotropic, N-Methyl D-Aspartate-Like 1A (GRINL1A) gene is a gene whose protein product facilitates signaling via the glutamatergic pathway through interaction with the NMDA receptor. Multiple splice isoforms have been identified, one of which is identified herein as SEQ ID NO 69 anmd by reference to GenBank Accession No. NM_{—}001018090. In some instances, GRINL1A splice isoforms are annotated as GCOM1.Tektin 5 (TEKT5) gene is a gene whose product has been implicated in the cellular construction of cilia and flagella. It is identified herein as SEQ ID NO 63 and by reference to GenBank Accession No. NM_{—}144674.1.

[0100] 1113 hydroxysteroid dehydrogenase type 1 (referred to herein as 11β-HSD1 or HSD11B1) gene is a gene having two isozymes of 11-HSD, 11β-HSD type 1 and type 2, that are the products of distinct genes and differ considerably in tissue distribution and function. 11β-HSD1 has been hypothesized to play a role in human obesity, adipose tissue formation and insulin resistance along with other diseases in that glucocorticoids are typically implicated, such as osteoporosis and glaucoma. (Tomlinson et al., 2004, 1113-Hydroxysteroid Dehydrogenase Type 1: A Tissue-Specific Regulator of Glucocorticoid Response, Endocrine Reviews 25(5): 831-866). It is identified herein as SEQ ID NO 3 and by reference to GenBank Accession No. NM_{—}005525.

[0101] The human cDNA encoding 11β-HSD1 comprises approximately 1.4 kb in length predicted an open reading frame of 876 bp and a protein of 292 amino acids, which is 77% identical at the amino acid level to the rat enzyme. The human gene has been designated HSD11β1 and is 30 kb in size, consisting of six exons (182, 130, 111, 185, 143, and 617 bp, respectively) and five introns (776, 767, 120, 25,300, and 1,700 bp, respectively). (Draper et al., 2002, J Clin Endocrinol Metab 87:4984-4990). Alternate 11β-HSD1 mRNA transcripts, as a result of differential promoter usage and alternate splicing mechanisms, have been demonstrated, giving rise to three proteins referred to as 11β-HSD1A, 11β-HSD1B (or HSD11B1), and 11β-HSD1C.

[0102] To date, there are few reports describing polymorphism in and around the HSD11B1 locus. A scan of the GenBank single-nucleotide polymorphism (SNP) database (db SNP on NCBI website) reveals a number of documented sequence variations detected primarily through human genome-sequencing projects.

[0103] A role for HSD11B1 in regulating insulin sensitivity can occur at the level of the liver (hepatic gluconeogenesis), adipose tissue (central obesity), or muscle. Various in vitro and rodent studies suggest a modulatory role for 11β-HSD1 in the control of hepatic gluconeogenesis. (Alberts et al., 2002, Diabetologia 45:1528-1532; Alberts et al., 2003, J Med Chem 45:3813-3815). Observational clinical studies in states of impaired glucose tolerance have, in almost all cases, demonstrated decreased hepatic 11β-HSD1 reductase activity as measured by cortisol generation profiles after an oral dose of cortisone acetate (Smith et al., 1982, Biol Neonate 42:201-207; Andrews et al., 2003, J Clin Endocrinol Metab 87:5587-5593; Rask et al., 2002, J Clin Endocrinol Metab 87:3330-3336, Stewart et al., 1999, J Clin Endocrinol Metab 84:1022-1027) and urinary F/E metabolite ratios (Rask et al., 2001, J Clin Endocrinol Metab 86:1418-1421; Stewart et al., 1999, J Clin Endocrinol Metab 84:1022-1027); Paterson J M et al., 2004, Proc Natl Acad Sci USA 101:7088-7093. 11β-HSD1 has also emerged as a therapeutic target in the metabolic syndrome.

[0104] Carbohydrate sulfotransferase (CHST10) is a gene whose protein product catalyzes transfer of sulfate to position 3 of terminal glucuronic acid of both protein- and lipid-linked oligosaccharides. Known also as HNK-1 sulfotransferase and MGC17148, it plays a role in the biosynthesis of FINK-1, a neuronally expressed carbohydrate that contains a sulfoglucuronyl residue carried by many neural recognition molecules. It is identified herein as SEQ ID NO 5 and by reference to GenBank Accession No. NM_{—}004854.

[0105] The invention provides nucleic acid molecules comprising a single nucleotide polymorphism (SNP) at a specific location, referred to herein as the polymorphic locus, and complements thereof. The nucleic acid molecules, e.g., a gene, which include the SNP has at least two alleles, referred to herein as the reference allele and the variant allele. The reference allele frequently, but not always, is the more common allele found in a heterogeneous population. Frequently, but not always, the reference allele is also the first identified allelic form. Other allelic forms are designated as variant alleles.

[0106] The TEKT5 SNPs were identified by whole genome scans of DNA from a large number of individuals that were subjected to DPP-IV inhibitor treatment and comparing the mean HBA1C response among SNP genotypes. These studies showed that the reference allele at nucleotide position 26,472 of SEQ ID NO: 63 is associated with a favorable response to administration of a therapeutically-effective amount of a DPP-IV inhibitor. The TEKT5 SNPs were identified due to the significant differences in mean HBA1C response among individuals with different genotypes on treatment, taking into account covariates such as demographic differences. Apparent favored HBA1C response for individuals homozygous for the wild-type allele was observed. The invention also provides a variant allele of the described TEKT5 gene and complements of the variant allele. The variant allele differs from the reference allele by one nucleotide at the polymorphic locus found at nucleotide position 26,472 of SEQ ID NOs: 63 and 64.

[0107] The invention also provides novel polynucleotides of the human GRINL1A gene comprising at least one single nucleotide polymorphism (SNP) that was shown to be associated with an increased likelihood of a favorable response to the administration of a therapeutically-effective and pharmaceutically acceptable amount of a DPP-IV inhibitor or a DPP-IV inhibitor in combination with other oral antidiabetic therapy. One GRINL1A SNP, rs11853270, was identified by whole genome scan in a large number of individuals that were subjected to DPP-IV inhibitor treatment and comparing the genotype frequencies of those individuals who were non-responders to the nucleotide sequences of those individuals who were super responders of DPP-IV inhibition. Additional GRINL1A SNPs were identified by sequencing the GRINL1A genomic DNA from a large number of individuals that were subjected to DPP-IV inhibitor treatment and comparing the GRINL1A nucleotide sequences of those individuals who were non-responders to the nucleotide sequences of those individuals who were super responders of DPP-IV inhibition. These studies showed that the reference alleles at nucleotide position 87,992 of SEQ ID NO: 1, at nucleotide position 89,441 of SEQ ID NO: 1, at nucleotide position 89,662 of SEQ ID NO: 1, at nucleotide position 89,853 of SEQ ID NO: 1, at nucleotide position 94,074 of SEQ ID NO: 1, at nucleotide position 87,712 of SEQ ID NO: 1, or at nucleotide position 93,598 of SEQ ID NO: 1, are associated with an increased likelihood of a favorable response to administration of a therapeutically-effective amount of a DPP-IV inhibitor or a DPP-IV inhibitor in combination with other oral antidiabetic therapy. Thus, the invention provides a reference allele(s) of the described GRINL1A gene and complements of the reference allele(s).

[0108] The invention also provides variant alleles of the described GRINL1A gene and complements of the variant alleles. One of the variant alleles differs from the reference allele by one nucleotide at the polymorphic locus found at nucleotide position 87,992 of SEQ ID NOs: 1, 2 and/or 75, at nucleotide position 89,441 of SEQ ID NOs: 1, 69 and/or 75, at nucleotide position 89,662 of SEQ ID NOs: 1, 70 and/or 75, at nucleotide position 89,853 of SEQ ID NOs: 1, 71 and/or 75, at nucleotide position 94,074 of SEQ ID NOs: 1, 72 and/or 75, at nucleotide position 87,712 of SEQ ID Nos: 1, 73, and/or 75, or at nucleotide position 93,598 of SEQ ID NOs: 1, 74 and/or 75.

[0109] The invention also provides novel polynucleotides of the human HSD11B1 gene comprising at least one single nucleotide polymorphism (SNP) that was shown to be associated with an increased likelihood of a favorable response to the administration of a therapeutically-effective amount of a DPP-IV inhibitor. The HSD11B1 SNP was identified by whole genome scan in a large number of individuals that were subjected to DPP-IV inhibitor treatment and comparing the genotype frequencies of those individuals who were non-responders to the nucleotide sequences of those individuals who were super responders of DPP-IV inhibition. These studies showed that the reference allele at nucleotide position 34,403 of SEQ ID NO: 3 is associated with an increased likelihood of a favorable response to administration of a therapeutically-effective amount of a DPP-IV inhibitor or a DPP-IV inhibitor in combination with other oral antidiabetic therapy. Thus, the invention provides a reference allele of the described HSD11B1 gene and complements of the reference allele.

[0110] The invention also provides a variant allele of the described HSD11B1 gene and complements of the variant allele. The variant allele differs from the reference allele by one nucleotide at the polymorphic locus found at nucleotide position 34,403 of SEQ ID NOs: 3 and 4.

[0111] The invention also provides novel polynucleotides of the human CHST10 gene comprising at least one single nucleotide polymorphism (SNP) that was shown to be associated with an increased likelihood of a favorable response to the administration of a therapeutically-effective and pharmaceutically acceptable amount of a DPP-IV inhibitor or a DPP-IV inhibitor in combination with other oral antidiabetic therapy. The CHST10 SNPs were identified by whole genome scan in a large number of individuals that were subjected to DPP-IV inhibitor treatment and comparing the genotype frequencies of those individuals who were non-responders to the nucleotide sequences of those individuals who were super responders of DPP-IV inhibition. These studies showed that the reference alleles at nucleotide position 24,707 of SEQ ID NO: 5, position 34,078 of SEQ ID NO: 5, position 35,799 of SEQ ID NO: 5, position 38,709 of SEQ ID NO: 5, position 38,947 of SEQ ID NO: 5, and position 41,180 of SEQ ID NO: 5 are associated with an increased likelihood of a favorable response to administration of a therapeutically-effective amount of a DPP-IV inhibitor or a DPP-IV inhibitor in combination with other oral antidiabetic therapy. Thus, the invention provides a reference allele(s) of the described CHST10 gene and complements of the reference allele(s).

[0112] The invention also provides variant alleles of the described CHST10 gene and complements of the variant alleles. One of the variant alleles differs from the reference allele by one nucleotide at the polymorphic locus found at nucleotide position 24,707 of SEQ ID NOs: 5, 6, and/or 12, at nucleotide position 34,078 of SEQ ID NOs: 5, 7, and/or 12, at nucleotide position 35,799 of SEQ ID NOs: 5, 8, and/or 12, at nucleotide position 38,709 of SEQ ID NOs: 5, 9, and/or 12, at nucleotide position 38,947 of SEQ ID NOs: 5, 10, and/or 12, or nucleotide position 41,180 of SEQ ID NOs: 5, 11, and/or 12.

[0113] The nucleic acid molecules or polynucleotides of the invention can comprise DNA or RNA, can be double- or single-stranded, and can comprise SNP-containing fragments thereof. The invention further provides fragments of the variant alleles and fragments of complements of the variant alleles that comprise the site of the SNP (e.g., polymorphic locus) and are at least five nucleotides in length. The fragments can be about 5 nucleotides to about 100 nucleotides in length including, for example, about 5 nucleotides to about 10, 15, 20, 25, 30, 40, 50, 60, 70, 80, 90 or 100 nucleotides, about 10 nucleotides to about 20, 25, 30, 35, 40, 50, 60, 70, 80, 90 or 100 nucleotides, about 15 nucleotides to about 25, 35, 45, 50, 60, 70, 80, 90, or 100 nucleotides, about 20 nucleotides to about 30, 40, 50, 60, 70, 80, 90, or 100 nucleotides, about 30 nucleotides to about 40, 50, 60, 70, 80, 90, or 100 nucleotides, about 40 nucleotides to about 50, 60, 70, 80, 90, or 100 nucleotides, about 50 nucleotides to about 60, 70, 80, 90, or 100 nucleotides, about 60 nucleotides to about 70, 80, 90, or 100 nucleotides, about 70 nucleotides to about 80, 90, or 100 nucleotides, about 80 nucleotides to about 90 or 100 nucleotides, and about 90 nucleotides to about 100 nucleotides, and preferably comprise at least one polymorphic allele.

[0114] Examples of polymorphisms include those found at nucleotide position 26,472 of SEQ ID NOs: 63 and 64, nucleotide position 87,992 of SEQ ID NOs: 1, 2 and/or 75, nucleotide position 89,441 of SEQ ID NOs: 1, 69 and/or 75, nucleotide position 89,662 of SEQ ID NOs: 1, 70 and/or 75, nucleotide position 89,853 of SEQ ID NOs: 1, 71 and/or 75, nucleotide position 94,074 of SEQ ID NOs: 1, 72 and/or 75, nucleotide position 87,712 of SEQ ID Nos: 1, 73, and/or 75, nucleotide position 93,598 of SEQ ID NOs: 1, 74 and/or 75, nucleotide position 34,403 of SEQ ID NOs: 3 and 4, nucleotide position 24,707 of SEQ ID NOs: 5, 6 and/or 12, nucleotide position 34,078 of SEQ ID NOs: 5, 7 and/or 12, nucleotide position 35,799 of SEQ ID NOs: 5, 8 and/or 12, nucleotide position 38,709 of SEQ ID NOs: 5, 9 and/or 12, nucleotide position 38,947 of SEQ ID NOs: 5, 10 and/or 12, and nucleotide position 41,180 of SEQ ID NOs: 5, 11 and/or 12.

[0115] In one particular embodiment, the invention provides human TEKT5 nucleic acid having the nucleotide sequence of SEQ ID NO: 63 or SEQ ID NO: 64 comprising a single nucleotide polymorphism at a polymorphic locus found at nucleotide 26.472 of SEQ ID NO: 63 or SEQ ID NO: 64. The reference nucleotide for the polymorphic locus at nucleotide 26,472 is “T”. The variant nucleotide for the polymorphic locus at nucleotide 26,472 is “C”. The nucleotide sequence(s) can be double- or single-stranded. The nucleotide sequence(s) can comprise the complementary sequence(s) of SEQ ID NOs: 63 and 64. The nucleotide sequence(s) can comprise the complement of the reference nucleotide for the polymorphic locus at nucleotide 26,472 (“A”). The nucleotide sequence(s) can comprise the complement of the variant nucleotide for the polymorphic locus at nucleotide 26,472 (“G”). In certain embodiments, the invention further provides a portion of the human TEKT5 gene comprising one or more polymorphic loci selected from nucleotide 26,472 of SEQ ID NO: 63 and/or SEQ ID NO: 64.

[0116] In another particular embodiment, the invention provides human GRINL1A nucleic acid having the nucleotide sequence of SEQ ID NOs: 1-2 and 69-75 comprising a single nucleotide polymorphism at a polymorphic locus at nucleotide position 87,712, 87,992, 89,441, 89,662, 89,853, 93,598, and/or 94,074 of SEQ ID NO: 1 or SEQ ID NOs: 2, 69-75. The reference nucleotide for the polymorphic locus at nucleotide position 87,712 of SEQ ID NO: 1 is “A”, the reference nucleotide for the polymorphic locus at nucleotide position 87,992 of SEQ ID NO: 1 is “T”, the reference nucleotide for the polymorphic locus at nucleotide position 89,441 of SEQ ID NO: 1 is “A”, the reference nucleotide for the polymorphic locus at nucleotide position 89,662 of SEQ ID NO: 1 is “G”, the reference nucleotide for the polymorphic locus at nucleotide position 89,853 of SEQ ID NO: 1 is “G”, the reference nucleotide for the polymorphic locus at nucleotide position 93,598 pf SEQ ID NO: 1 is “G”, and the reference nucleotide for the polymorphic locus at nucleotide position 94,074 of SEQ ID NO: 1 is “G”.

[0117] The variant nucleotide for the polymorphic locus at nucleotide position 87,712 of SEQ ID NO: 71 or 75 is “G”. The variant nucleotide for the polymorphic locus at nucleotide position 87,992 of SEQ ID NO: 2 or 75 is “C”. The variant nucleotide for the polymorphic locus at nucleotide position 89,441 of SEQ ID NO: 69 or 75 is “G”. The variant nucleotide for the polymorphic locus at nucleotide position 89,662 of SEQ ID NO: 70 or 75 is “A”. The variant nucleotide for the polymorphic locus at nucleotide position 89,853 of SEQ ID NO: 71 or 75 is “A”. The variant nucleotide for the polymorphic locus at nucleotide position 93,598 of SEQ ID NO: 74 or 75 is “A”. The variant nucleotide for the polymorphic locus at nucleotide position 94,074 of SEQ ID NO: 72 or 75 is “C”.

[0118] The nucleotide sequences of the invention can be double- or single-stranded. The nucleotide sequence(s) can comprise the complementary sequence(s) of SEQ ID NOs: 1, 2 and 69-75. The nucleotide sequence(s) can comprise the complement of the reference nucleotide for the polymorphic locus at nucleotide 87,712 (“A”). The nucleotide sequence(s) can comprise the complement of the variant nucleotide for the polymorphic locus at nucleotide 87,712 (“G”). The nucleotide sequence(s) can comprise the complement of the reference nucleotide for the polymorphic locus at nucleotide 87,992 (“T”). The nucleotide sequence(s) can comprise the complement of the variant nucleotide for the polymorphic locus at nucleotide 87,992 (“C”). The nucleotide sequence(s) can comprise the complement of the reference nucleotide for the polymorphic locus at nucleotide 89,441 (“A”). The nucleotide sequence(s) can comprise the complement of the variant nucleotide for the polymorphic locus at nucleotide 89,441 (“G”). The nucleotide sequence(s) can comprise the complement of the reference nucleotide for the polymorphic locus at nucleotide 89,662 (“G”). The nucleotide sequence(s) can comprise the complement of the variant nucleotide for the polymorphic locus at nucleotide 89,662 (“A”). The nucleotide sequence(s) can comprise the complement of the reference nucleotide for the polymorphic locus at nucleotide 89,853 (“G”). The nucleotide sequence(s) can comprise the complement of the variant nucleotide for the polymorphic locus at nucleotide 89,853 (“A”). The nucleotide sequence(s) can comprise the complement of the reference nucleotide for the polymorphic locus at nucleotide 93,598 (“G”). The nucleotide sequence(s) can comprise the complement of the variant nucleotide for the polymorphic locus at nucleotide 93,598 (“A”). The nucleotide sequence(s) can comprise the complement of the reference nucleotide for the polymorphic locus at nucleotide 94,074 (“G”). The nucleotide sequence(s) can comprise the complement of the variant nucleotide for the polymorphic locus at nucleotide 94,074 (“C”). The invention further provides a portion of the human GRINL1A gene comprising one or more polymorphic loci selected from nucleotide 87,712, 87,992, 89,441, 89,662, 89,853, 93,598, and 94,074 of SEQ ID NO: 1 and/or SEQ ID NO: 2, 69-75.

[0119] In another particular embodiment, the invention provides human HSD11B1 nucleic acid having the nucleotide sequence of SEQ ID NO: 3 or SEQ ID NO: 4 comprising a single nucleotide polymorphism at a polymorphic locus found at nucleotide 34,403 of SEQ ID NO: 3 or SEQ ID NO: 4. The reference nucleotide for the polymorphic locus at nucleotide 34,403 is “C”. The variant nucleotide for the polymorphic locus at nucleotide 34,403 is “T”. The nucleotide sequences of the invention can be double- or single-stranded. The nucleotide sequence(s) can comprise the complementary sequence(s) of SEQ ID NOs: 3 and 4. The nucleotide sequence(s) can comprise the complement of the reference nucleotide for the polymorphic locus at nucleotide 34,403 (“G”). The nucleotide sequence(s) can comprise the complement of the variant nucleotide for the polymorphic locus at nucleotide 34,403 (“A”). In certain embodiments, the invention further provides a portion of the human HSD11B1 gene comprising one or more polymorphic loci selected from nucleotide 34,403 of SEQ ID NO: 3 and/or SEQ ID NO: 4.

[0120] In another particular embodiment, the invention provides human CHST10 nucleic acid having the nucleotide sequence of SEQ ID NOs: 5-12 comprising a single nucleotide polymorphism at a polymorphic locus at nucleotide position 24,707, 34,078, 35,799, 38,709, 38,947, and/or 41,180 of SEQ ID NO: 5 or SEQ ID NOs: 6-12. The reference nucleotide for the polymorphic locus at nucleotide position 24,707 of SEQ ID NO: 5 is “G”, the reference nucleotide for the polymorphic locus at nucleotide position 34,078 of SEQ ID NO: 5 is “C”, the reference nucleotide for the polymorphic locus at nucleotide position 35,799 of SEQ ID NO: 5 is “G”, the reference nucleotide for the polymorphic locus at nucleotide position 38,709 of SEQ ID NO: 5 is “A”, the reference nucleotide for the polymorphic locus at nucleotide position 38,947 of SEQ ID NO: 5 is “C”, and the reference nucleotide for the polymorphic locus at nucleotide position 41,180 of SEQ ID NO: 5 is “T”.

[0121] The variant nucleotide for the polymorphic locus at nucleotide position 24,707 of SEQ ID NO: 6 or 12 is “A”. The variant nucleotide for the polymorphic locus at nucleotide position 34,078 of SEQ ID NO: 7 or 12 is “T”. The variant nucleotide for the polymorphic locus at nucleotide position 35,799 of SEQ ID NO: 8 or 12 is “C”. The variant nucleotide for the polymorphic locus at nucleotide position 38,709 of SEQ ID NO: 9 or 12 is “G”. The variant nucleotide for the polymorphic locus at nucleotide position 38,947 of SEQ ID NO: 10 or 12 is “A”. The variant nucleotide for the polymorphic locus at nucleotide position 41,180 of SEQ ID NO: 11 or 12 is “C”.

[0122] The nucleotide sequences of the invention can be double- or single-stranded. The nucleotide sequence(s) can comprise the complementary sequence(s) of SEQ ID NOs: 5-12. The nucleotide sequence(s) can comprise the complement of the reference nucleotide for the polymorphic locus at nucleotide 24,707 (“C”). The nucleotide sequence(s) can comprise the complement of the variant nucleotide for the polymorphic locus at nucleotide 24,707 (“T”). The nucleotide sequence(s) can comprise the complement of the reference nucleotide for the polymorphic locus at nucleotide 34,078 (“G”). The nucleotide sequence(s) can comprise the complement of the variant nucleotide for the polymorphic locus at nucleotide 34,078 (“A”). The nucleotide sequence(s) can comprise the complement of the reference nucleotide for the polymorphic locus at nucleotide 35,799 (“C”). The nucleotide sequence(s) can comprise the complement of the variant nucleotide for the polymorphic locus at nucleotide 35,799 (“G”). The nucleotide sequence(s) can comprise the complement of the reference nucleotide for the polymorphic locus at nucleotide 38,709 (“T”). The nucleotide sequence(s) can comprise the complement of the variant nucleotide for the polymorphic locus at nucleotide 38,709 (“C”). The nucleotide sequence(s) can comprise the complement of the reference nucleotide for the polymorphic locus at nucleotide 38,947 (“G”). The nucleotide sequence(s) can comprise the complement of the variant nucleotide for the polymorphic locus at nucleotide 38,947 (“T”). The nucleotide sequence(s) can comprise the complement of the reference nucleotide for the polymorphic locus at nucleotide 41,180 (“A”). The nucleotide sequence(s) can comprise the complement of the variant nucleotide for the polymorphic locus at nucleotide 41,180 (“G”). The invention further provides a portion of the human CHST10 gene comprising one or more polymorphic loci selected from nucleotide 24,707, 34,078, 35,799, 38,709, 38,947, and 41,180 of SEQ ID NO: 5 and/or SEQ ID NO: 6-12.

[0123] The reference allele of the single nucleotide polymorphisms described herein derived from the TEKT5, GRINL1A, HSD11B1 or CHST10 gene are shown herein to be associated with an increased likelihood of a favorable response to the administration of a therapeutically-effective amount of a DPP-IV inhibitor or a DPP-IV inhibitor in combination with other oral antidiabetic therapy. The variant allele of the single nucleotide polymorphisms of the human TEKT5, GRINL1A, HSD11B1 or CHST10 gene described herein were shown to be associated with a decrease in the likelihood of a favorable response to the administration of a therapeutically-effective amount of a DPP-IV inhibitor or a DPP-IV inhibitor in combination with other oral antidiabetic therapy.

[0124] The invention further provides allele-specific oligonucleotides that hybridize to human TEKT5, GRINL1A, HSD11B1 or CHST10 gene sequences, and fragments and complements thereof, comprising the described nucleotide polymorphisms and/or polymorphic loci. Such oligonucleotides can be designed to specifically hybridize to one polymorphic allele of the nucleic acid molecules described herein without hybridizing to other allele(s). Such oligonucleotides can be used to determine the presence or absence of a particular allele of the polymorphic sequences described herein and to distinguish between reference and variant allele for each form. These oligonucleotides can be probes or primers, such as the probes and primers provided herein.

[0125] The described polynucleotides and oligonucleotides of the invention, as well as the corresponding methods described herein, can be used to analyze a nucleic acid isolated from an individual to identify the presence or absence of a particular nucleotide at a given polymorphic locus and to distinguish between the reference and variant allele at each locus. In certain embodiments, the method of analyzing the nucleic acid comprises determining, by means of differential hybridization detection, which base is present at nucleotide position 26,472 of SEQ ID NOs: 63 and 64 for the TEKT5 gene, determining which base is present at nucleotide position 87,992 of SEQ ID NOs: 1 and 2 for the GRINL1A gene, determining which base is present at nucleotide position 89,441 of SEQ ID NOs: 1 and 69 for the GRINL1A gene, determining which base is present at nucleotide position 89,662 of SEQ ID NOs: 1 and 70 for the GRINL1A gene, determining which base is present at nucleotide position 89,853 of SEQ ID NOs: 1 and 71 for the GRINL1A gene, determining which base is present at nucleotide position 94,074 of SEQ ID NOs: 1 and 72 for the GRINL1A gene, determining which base is present at nucleotide position 87,712 of SEQ ID NOs: 1 and 73 for the GRINL1A gene, determining which base is present at nucleotide position 93,598 of SEQ ID NOs: 1 and 74 for the GRINL1A gene, determining which base is present at nucleotide position 34,403 of SEQ ID NOs: 3 and 4 for the HSD11B1 gene, determining which base is present at nucleotide position 24,707 of SEQ ID NOs: 5 and 6 for CHST10 gene, determining which base is present at nucleotide position 34,078 of SEQ ID NOs: 5 and 7 for CHST10 gene, determining which base is present at nucleotide position 35,799 of SEQ ID NOs: 5 and 8 for CHST10 gene, determining which base is present at nucleotide position 38,709 of SEQ ID NOs: 5 and 9 for CHST10 gene, determining which base is present at nucleotide position 38,947 of SEQ ID NOs: 5 and 10 for CHST10 gene, and determining which base is present at nucleotide position 41,180 of SEQ ID NOs: 5 and 11 for CHST10 gene. Optionally, a set of nucleotides present at the polymorphic loci described herein for the TEKT5 gene, the GRINL1A gene, the HSD11B1 gene, and the CH gene is determined using the oligonucleotides and methods described herein. This type of analysis can also be performed on a number of individuals, who are additionally tested (previously, concurrently or subsequently) for the existence of an increased likelihood of a favorable response to the administration of a therapeutically-effective amount of a DPP-IV inhibitor or a DPP-IV inhibitor in combination with other oral antidiabetic therapy phenotype in the presence or absence of a DPP-IV protease inhibitor. The existence of an increased likelihood of a favorable response to the administration of a therapeutically-effective amount of a DPP-IV inhibitor or a DPP-IV inhibitor in combination with other oral antidiabetic therapy phenotype is then correlated with a nucleotide (allele) or set of nucleotides present at the polymorphic locus or loci in the patient and/or sample tested.

[0126] Thus, the invention further provides methods for determining the likelihood (e.g., increased or decreased of a favorable response to the administration of a therapeutically-effective amount of a DPP-IV inhibitor or a DPP-IV inhibitor in combination with other oral antidiabetic therapy. In a particular embodiments, the method comprises obtaining a nucleic acid sample from an individual and determining the identity of nucleotides at specified polymorphic loci of the nucleic acid molecules described herein, wherein the presence of a particular nucleotide is correlated with the incidence of an increased likelihood of a favorable response to the administration of a therapeutically-effective amount of a DPP-IV inhibitor or a DPP-IV inhibitor in combination with other oral antidiabetic therapy phenotype in the presence of a DPP-IV inhibitor or a DPP-IV inhibitor in combination with other oral antidiabetic therapy, thereby determining the likelihood of a favorable response to the administration of a therapeutically-effective amount of a DPP-IV inhibitor or a DPP-IV inhibitor in combination with other oral antidiabetic therapy in the individual or sample. The correlation between a particular polymorphic form of a gene and a phenotype can thus be used in methods of diagnosis of that phenotype, as well as in the development of various treatments for the phenotype.

[0127] As used herein, the term “oligonucleotide” refers to DNA or RNA, and single- or double-stranded nucleic acid. An oligonucleotide can be used, for example, as either a “primer” or a “probe”. Oligonucleotides can be naturally occurring or synthetic, but are typically prepared by synthetic means. An oligonucleotide primer, for example, can be designed to hybridize to the complementary sequence of either the sense or antisense strand of a specific target sequence, and can be used alone or as a pair, such as in DNA amplification reactions. The oligonucleotide primer may or may not comprise one or more polymorphic loci of the invention. An oligonucleotide probe can also be designed to hybridize to the complementary sequence of either the sense or antisense strand of a specific target sequence, and can be used alone or as a pair, such as in DNA amplification reactions, but necessarily will comprise one or more polymorphic loci of the invention.

[0128] Preferred oligonucleotides of the invention include fragments of DNA, and complements thereof, of the human TEKT5, GRINL1A, HSD11B1 and CHST10 gene, and can comprise a polymorphic locus selected from nucleotide position 26,472 of SEQ ID NO: 63 or 64 for the TEKT5 gene, nucleotide position 87,992 of SEQ ID NO: 1 or 2 for the GRINL1A gene, nucleotide position 89,441 of SEQ ID NO: 1 or 69 for the GRINL1A gene, nucleotide position 89,662 of SEQ ID NO: 1 or 70 for the GRINL1A gene, nucleotide position 89,853 of SEQ ID NO: 1 or 71 for the GRINL1A gene, nucleotide position 94,074 of SEQ ID NO: 1 or 72 for the GRINL1A gene, nucleotide position 87,712 of SEQ ID NO: 1 or 73 for the GRINL1A gene, nucleotide position 93,598 of SEQ ID NO: 1 or 74 for the GRINL1A gene, nucleotide position 34,403 of SEQ ID NO: 3 or 4, nucleotide position 24,707 of SEQ ID NO: 5 or 6, nucleotide position 34,078 of SEQ ID NO: 5 or 7, nucleotide position 35,799 of SEQ ID NO: 5 or 8, nucleotide position 38,709 of SEQ ID NO: 5 or 9, nucleotide position 38,947 of SEQ ID NO: 5 or 10, and nucleotide position 41,180 of SEQ ID NO: 5 or 11 for the CHST10 gene. The polymorphic locus can occur within any nucleotide position of the fragment, including at either terminal position or any internal position, including directly in the middle of the fragment. The fragments can be from any of the allelic forms of DNA shown or described herein.

[0129] As used herein, the terms “nucleotide”, “base” and “nucleic acid” are intended to be equivalent. The terms “nucleotide sequence”, “nucleic acid sequence”, “nucleic acid molecule”, “oligonucleotide”, and “nucleic acid segment” are intended to be equivalent.

[0130] Hybridization probes are oligonucleotides that bind in a base-specific manner to a complementary strand of nucleic acid and as used herein are designed to identify an allele at polymorphic loci, for example, within the TEKT5, GRINL1A, HSD11B1 and CHST10 genes described herein. Such probes can include peptide nucleic acids, as described in Nielsen et al. (1991, Science 254: 1497-1500). Probes can be any length suitable for specific hybridization to the target nucleic acid sequence. The most appropriate length of the probe varies depending upon the hybridization method in which it is being used; for example, particular lengths may be more appropriate for use in microfabricated arrays, while other lengths may be more suitable for use in classical hybridization methods. Such hybridization optimizations are known to the skilled artisan. Suitable probes can range from about 6 nucleotides to about 40 nucleotides, including about 12 nucleotides to about 25 nucleotides in length. For example, probes and primers can be about 6, 8, 10, 12, 14, 16, 18, 20, 22, 24, 25, 26, 28, 30, 32, 34, 36, 38, or about 40 nucleotides in length. The probe can comprise the sequence or complementary sequence of any of the polymorphic loci described herein, including a polymorphic locus comprising a reference allele or a variant allele. The nucleotide sequence of the probe can correspond to the coding sequence of the allele or to the complement of the coding sequence of the allele, where applicable.

[0131] Probe hybridizations are usually performed under stringency conditions having a salt concentration of no more than 1 M and a temperature of at least 25° C., depending, inter alia, on the length and sequence complexity of the probe. For example, conditions of 5×SSPE (750 mM NaCl, 50 mM NaPhosphate, 5 mM EDT A, pH 7.4) and a temperature of 25-30° C., or equivalent conditions, are suitable for allele-specific probe hybridizations. Equivalent conditions can be determined by varying one or more of the parameters given as an example, as known in the art, while maintaining a similar degree of identity or similarity between the target nucleotide sequence and the primer or probe used. Hybridization methods are well-known in the art.

[0132] As used herein, the term “primer” refers to a single-stranded oligonucleotide which acts as a point of initiation of template-directed DNA synthesis under appropriate conditions. Such DNA synthesis reactions can be carried out using conventional conditions in the presence of a sufficient (excess) concentration of all four different nucleoside triphosphates (e.g., in the form of phosphoramidates, for example) corresponding to adenine, guanine, cytosine and thymine or uracil nucleotides, and a polymerization catalyst, such as DNA or RNA polymerase or reverse transcriptase in an appropriate buffer and at a suitable temperature. Alternatively, such a DNA synthesis reaction may utilize only a single nucleoside (e.g., for single base-pair extension assays). The appropriate length of a primer depends on the intended use of the primer, but typically ranges from about 10 to about 30 nucleotides. Short primer molecules generally require cooler temperatures to form sufficiently stable hybrid complexes with the template. A primer need not reflect the exact sequence of the template, but must be sufficiently complementary to hybridize with a template. The term “primer site” refers to the area of the target DNA to which a primer hybridizes. The term “primer pair” refers to a set of primers including a 5′ (upstream) primer that hybridizes with the 5′ end of the DNA sequence to be amplified and a 3′ (downstream) primer that hybridizes with the complement of the 3′ end of the sequence to be amplified; generally, primer pairs do not hybridize with each other under the reaction conditions used.

[0133] As used herein, “polymorphism” refers to the occurrence of two or more genetically determined alternative sequences or alleles in a population. A “polymorphic locus” is a marker or site at which divergence from a reference allele occurs. The phrase “polymorphic loci” is meant to refer to two or more markers or sites at which divergence from two or more reference alleles occurs. Preferred markers have at least two alleles, each occurring at frequency of greater than 1%, and more preferably at a frequency greater than 10%-20% of a selected population. A polymorphic locus can be as small as one base pair (i.e., a single nucleotide polymorphism, or SNP). Polymorphic loci include, for example, restriction fragment length polymorphisms, variable number of tandem repeats (VNTR's), hypervariable regions, minisatellites, dinucleotide repeats, trinucleotide repeats, tetranucleotide repeats, simple sequence repeats, and insertion elements such as Alu. The “reference” allele is frequently, but not always, the more common allele found in a heterogeneous population and frequently, but not always, is also the first identified allelic form. Other allelic forms are designated as “variant” alleles. The allelic form occurring most frequently in a selected population is also sometimes referred to as the “wild type” form. Diploid organisms can be homozygous or heterozygous for allelic forms. A diallelic or biallelic polymorphism has two forms. A triallelic polymorphism has three forms.

[0134] A single nucleotide polymorphism occurs at a polymorphic locus occupied by a single nucleotide, which is the site of variation between allelic sequences. The site is usually preceded by and followed by highly conserved sequences of the allele (e.g., sequences that vary in less than 1/100 or 1/1000 members of the populations).

[0135] A single nucleotide polymorphism usually arises due to substitution of one nucleotide for another at the polymorphic locus. A transition is the replacement of one purine by another purine or one pyrimidine by another pyrimidine. A transversion is the replacement of a purine by a pyrimidine or vice versa. Single nucleotide polymorphisms can also arise from a deletion of a nucleotide or an insertion of a nucleotide relative to a reference allele. Typically the polymorphic locus is occupied by a base other than the reference base. For example, where the reference allele contains the base “C” at the polymorphic site, the altered allele can contain a “T”, “G” or “A” at the polymorphic locus.

[0136] For the purposes of this invention the terms “polymorphic position”, “polymorphic site”, “polymorphic locus”, and “polymorphic allele” shall be construed to be equivalent and are defined as the location of a sequence identified as having more than one nucleotide represented at that location in a population comprising at least one or more individuals, and/or chromosomes.

[0137] As used herein, the term “genotype” is meant to encompass the particular alleles present at a polymorphic locus of a nucleic acid sample, a gene, and/or chromosome.

[0138] As used herein, the term “haplotype” is meant to encompass the combination of genotypes across two or more polymorphic loci of a DNA sample, a gene, and/or chromosome, wherein the genotypes are closely linked, may be inherited together as a unit, and may be in linkage disequilibrium relative to other haplotypes and/or genotypes of other DNA samples, genes, and/or chromosomes.

[0139] As used herein, the term “linkage disequilibrium” refers to a measure of the degree of association between two alleles in a population. For example, when alleles at two distinctive loci occur in a sample more frequently than expected given the known allele frequencies and recombination fraction between the two loci, the two alleles may be described as being in “linkage disequilibrium”.

[0140] As used herein, the terms “genotype assay” and “genotype determination”, and the phrase “to genotype” or any verb usages of the term “genotype” are intended to be equivalent and refer to assays designed to identify the allele or alleles at a particular polymorphic locus or loci in a DNA sample, a gene, and/or chromosome. Such assays can employ, for example, single base extension reactions, DNA amplification reactions that amplify across one or more polymorphic loci, or may be as simple as sequencing across one or more polymorphic loci. A number of methods are known in the art for genotyping, with many of these assays being described or referred to herein.

[0141] The invention described herein discloses whole genome scans and resequencing of the human TEKT5, GRINL1A, HSD11B1 and/or CHST10 gene in a large number of individuals to identify polymorphisms that predispose individuals to an increased likelihood of a favorable response to an administered DPP-IV inhibitor. For example, polymorphisms in the HSD11B1 and/or CHST10 gene described herein are associated with an increased likelihood of a favorable response to an administered DPP-IV inhibitor and are useful for predicting the likelihood that an individual will have such a response upon the administration of a DPP-IV inhibitor or a DPP-IV inhibitor in combination with other oral antidiabetic therapy.

[0142] By altering amino acid sequence, SNPs may alter the function of the encoded proteins. The discovery of a SNP can facilitate biochemical analysis of the variants and the development of assays to characterize the variants and to screen for pharmaceutical compounds that would interact directly with one or another form of the protein. SNPs (including silent SNPs) can also alter regulation of gene expression at the transcriptional or post-transcriptional level. SNPs (including silent SNPs) also enable the development of specific DNA, RNA, or protein-based diagnostics that detect the presence or absence of the polymorphism in particular conditions.

[0143] The phrase “DPP-IV inhibitor” is meant to encompass compounds, including, but not limited to, saxagliptin; 2-[4-{{2-(2S,5R)-2-cyano-5-ethynyl-1-pyrrolidinyl]-2-oxoethyl]amino]-4-methyl-1-piperidinyl]-4-pyridinecarboxylic acid (ABT-279); 7-But-2-ynyl-9-(6-methoxy-pyridin-3-yl)-6-piperazin-1-yl-7,9-dihydro-purin-8-one; E3024, 3-but-2-ynyl-5-methyl-2-pip erazin-1-yl-3,5-dihydro-4H-imidazo[4,5-d]pyridazin-4-one tosylate; Sitagliptin; cis-2,5-dicyanopyrrolidine; 2-[3-[2-[(2S)-2-Cyano-1-pyrrolidinyl]-2-oxoethylamino]-3-methyl-1-oxobutyl]-1,2,3,4-tetrahydroisoquinoline; 2-Cyano-4-fluoro-1-thiovalylpyrrolidine analogues; KR-62436, 6-{2-[2-(5-cyano-4,5-dihydropyrazol-1-yl)-2-oxoethylamino]ethylamino}nicotinonitrile; Glutamic acid analogues; Vildagliptin ((2S)-{[(3-hydroxyadamantan-1-yl)amino]acetyl}-pyrrolidine-2-carbonitrile; 1-((S)-gamma-substituted prolyl)-(S)-2-cyanopyrrolidine; (2R)-4-oxo-4-[3-(trifluoromethyl)-5,6-dihydro[1,2,4]triazolo[4,3-a]pyrazin-7(8H)-yl]-1-(2,4,5-trifluorophenyl)butan-2-amine; aminomethylpyrimidine; Gamma-amino-substituted analogues of 1-[(S)-2,4-diaminobutanoyl]piperidine; 1-[[(3-hydroxy-1-adamantyl)amino]acetyl]-2-cyano-(S)-pyrrolidine; NVP-DPP728 (1-[[[2-[(5-cyanopyridin-2-yl)amino]ethyl]amino]acetyl]-2-cyano-(S)-pyrrolidine); 1-[2-[(5-Cyanopyridin-2-yl)amino]ethylamino]acetyl-2-(S)-pyrrolidinecarbonitrile; FE 999011; alogliptin; and alogliptin benzoate, in addition to any other DPP-IV inhibitor known in the art, as well as any salt, formulation and/or combination of the same.

[0144] “Saxagliptin” refers to the compound with the chemical name (1S,3S,55)-2-[(2S)-2-amino-2-(3-hydroxytricyclo[3.3.1.1^{3,7}]dec-1-yl)-1-oxoethyl]-2-azabicyclo[3.1.0]hexane-3-carbonitrile or the alternative chemical name (1S,3S,5S)-2-[(2S)-2-amino-2-(3-hydroxy-1-adamantyl)-1-oxoethyl]-2-azabicyclo[3.1.0]hexane-3-carbonitrile having the formula provided as (I) below, as well as any pharmaceutically acceptable salt of this compound, any solvate or hydrate of the compound, any solvate of a pharmaceutically acceptable salt of the compound, and any crystal form of the compound or of a pharmaceutically acceptable salt of the compound, solvate of the compound, or solvate of a salt of the compound. Saxagliptin is disclosed in U.S. Pat. No. 6,395,767 (exemplified in Example 60), which is incorporated in its entirety herein.

[chemical structure]

[0145] “Alogliptin” or its salt “alogliptin benzoate” is another example of a DPP-IV inhibitor or a DPP-IV inhibitor in combination with other oral antidiabetic therapy. Alogliptin benzoate” refers to the compound with the chemical name 2-[[6-[(3R)-3-amino-1-piperidinyl]-3,4-dihydro-3-methyl-2,4-dioxo-(2H)-pyrimidin-1-yl]methyl]-benzonitrile having the formula provided as (II) below, as well as any pharmaceutically acceptable salt of this compound, any solvate or hydrate of the compound, any solvate of a pharmaceutically acceptable salt of the compound, and any crystal form of the compound or of a pharmaceutically acceptable salt of the compound, solvate of the compound, or solvate of a salt of the compound. Alogliptin is disclosed in International Application No. WO2005/095381 (exemplified as compound 4), which is incorporated in its entirety herein.

[chemical structure]

[0146] The term “isolated” is used herein to indicate that the material in question exists in a physical milieu distinct from that in which it occurs in nature, and thus is altered “by the hand of man” from its natural state.

[0147] As used herein, the term “polynucleotide” refers to a molecule comprising a nucleic acid of the invention. A polynucleotide can contain the nucleotide sequence of a full length cDNA sequence, including the 5′ and 3′ untranslated sequences, the coding region, with or without a signal sequence, and the secreted protein coding region, and can also contain the nucleotide sequence of the genomic sequence with or without the accompanying promoter and transcriptional termination sequences. The term “polynucleotide” also includes fragments, epitopes, domains, and variants of the cDNA and genomic nucleic acid sequences, as well as complements thereof. In specific examples, the polynucleotides of the invention include, among others, SEQ ID NOs: 1-12, 63-64, and 69-75.

[0148] A “polynucleotide” of the invention also includes those polynucleotides capable of hybridizing, under stringent hybridization conditions, to sequences described herein, or the complement(s) thereof “Stringent hybridization conditions” refers to an overnight incubation (typically, of filters comprising DNA sequences to be hybridized to a detectable or detectably-labeled probe) at 42° C. in a solution comprising 50% formamide, 5×SSC (750 mM NaCl, 75 mM trisodium citrate), 50 mM sodium phosphate (pH 7.6), 5×Denhardt's solution, 10% dextran sulfate, and 20 μg/ml denatured, sheared salmon sperm DNA, or equivalent solution, followed by washing the filters in 0.1×SSC at about 65° C.

[0149] A “polynucleotide” of the invention can be made up of any polyribonucleotide or polydeoxyribonucleotide that can be unmodified RNA or DNA or modified RNA or DNA. For example, polynucleotides can be made up of single- and double-stranded DNA, DNA that is a mixture of single- and double-stranded regions, single- and double-stranded RNA, and RNA that is mixture of single- and double-stranded regions, hybrid molecules comprising DNA and RNA that may be single-stranded or, more typically, double-stranded or a mixture of single- and double-stranded regions. In addition, the polynucleotide can be made up of triple-stranded regions comprising RNA or DNA or both RNA and DNA. A polynucleotide can also contain one or more modified bases, one or more sugar modifications, or DNA or RNA backbone modifications for stability or for other reasons. “Modified” bases include, for example, tritylated bases and atypical bases, such as inosine. A variety of modifications can be made to DNA and RNA; thus, the term “polynucleotide” embraces chemically, enzymatically, or metabolically modified forms.

[0150] As used herein, a “polypeptide” refers to a molecule having the translated amino acid sequence generated from the polynucleotide as defined.

[0151] Unless otherwise indicated, all nucleotide sequences determined by sequencing a DNA molecule herein were determined using an automated DNA sequencer (such as the Model 3730-XL or SOLiD System Sequencer from Applied Biosystems, Inc., the PE 9700 from Perkin Elmer, the GS FXL Titanium from 454 Sequencing, and/or the Genome Analyzer from Solexa), and all amino acid sequences of polypeptides encoded by DNA molecules determined herein were predicted by translation of a DNA sequence determined above. The nucleotide sequence can also be determined by other approaches including manual DNA sequencing methods well known in the art. As is also known in the art, a single insertion or deletion in a determined nucleotide sequence that is a protein-coding sequence, compared to the actual sequence will cause a frame shift in translation of the nucleotide sequence such that the predicted amino acid sequence encoded by a determined nucleotide sequence will be completely different from the amino acid sequence actually encoded by the sequenced DNA molecule, beginning at the point of such an insertion or deletion. Since the invention provides methods for identifying single nucleotide polymorphisms whereby the novel sequence differs by as few as a single nucleotide from a reference sequence, identified SNPs were multiply verified to ensure each novel sequence represented a true SNP.

[0152] The phrase “favorable response to a DPP-IV inhibitor or a DPP-IV inhibitor in combination with other oral antidiabetic therapy” and the like, is meant to encompass a significant decrease in mean glycosylated hemoglobin (HbA1c) levels post administration of a DPP-IV inhibitor or a DPP-IV inhibitor in combination with other oral antidiabetic therapy, such as, for example, a decrease of at least about 0.5, and preferably a decrease of at least about 1.0, and more preferably a decrease of at least about 1.5 or more of HbA1c levels. The HbA1c units are reported as a standard unit, % HbA1c, as described in Colman et al., “Glycohaemoglobin—A crucial Measurement in Modern Diabetes Management. Progress Towards Standardization and Improved Precision of Measurement”, Consensus Statement from the Australian Diabetes Society, Royal College of Australia Association of Clinical Biochemists, pp 1-11. A favorable response to a DPP-IV inhibitor or a DPP-IV inhibitor in combination with other oral antidiabetic therapy can also be measured by measuring the level of fasting glucose or AUC glucose.

[0153] The phrase “therapeutically-effective amount of a DPP-IV inhibitor or a DPP-IV inhibitor in combination with other oral antidiabetic therapy” refers to a pharmaceutically acceptable amount of DPP-IV inhibitor administered to subjects or patients in accordance with standard medical practice for the treatment of or amelioration of symptoms arising from conditions or disorders relating to the impaired metabolism of glucose. The phrase “therapeutically-effective amount of a DPP-IV inhibitor or a DPP-IV inhibitor in combination with other oral antidiabetic therapy” also refers to that amount of DPP-IV inhibitor required to elicit a therapeutic effect in a subject or patient, such as the treatment of or amelioration of symptoms arising from conditions or disorders relating to the impaired metabolism of glucose, including, for example, but not limited to diabetes, type II diabetes, complications of diabetes, including retinopathy, neuropathy, nephropathy and delayed wound healing, diseases related to diabetes including insulin resistance, impaired glucose homeostatis, hyperglycaemia, hyperinsulinemia, elevated blood levels of fatty acids or glycerol, obesity, hyperlipidemia including hypertriglyceridemia, Syndrome X, atherosclerosis, and hypertension, among others. Therapeutically-effective amounts of various DPP-IV inhibitors are known. For example, saxagliptin can be administered at 2.5 mg, 5 mg, 10 mg, 20 mg, or 40 mg once daily, with high doses being up to 100 mg once daily (see J. Rosenstock, et al., Diabetes, Obesity and Metabolism, 10(5):376-386 (2008)).

[0154] The term “nucleotide position 26,472” is meant to refer to the allele at the polymorphic locus located at nucleotide 26,472 of SEQ ID NO: 63 and/or 64. One skilled in the art would recognize that reference to this allele is not limited to only SEQ ID NO: 63 and/or 64, but rather necessarily also includes any other polynucleotide that may include this sequence, or a portion of this sequence surrounding this polymorphic locus.

[0155] The term “nucleotide position 87,992” is meant to refer to the allele at the polymorphic locus located at nucleotide 87,992 of SEQ ID NO: 1, 2, and/or 75. One skilled in the art would recognize that reference to this allele is not limited to only SEQ ID NO: 1 and/or 2, but rather necessarily also includes any other polynucleotide that may include this sequence, or a portion of this sequence surrounding this polymorphic locus.

[0156] The term “nucleotide position 89,441” is meant to refer to the allele at the polymorphic locus located at nucleotide 89,441 of SEQ ID NO: 1, 69, and/or 75. One skilled in the art would recognize that reference to this allele is not limited to only SEQ ID NO: 1, 69, and/or 75, but rather necessarily also includes any other polynucleotide that may include this sequence, or a portion of this sequence surrounding this polymorphic locus.

[0157] The term “nucleotide position 89,662” is meant to refer to the allele at the polymorphic locus located at nucleotide 89,662 of SEQ ID NO: 1, 70, and/or 75. One skilled in the art would recognize that reference to this allele is not limited to only SEQ ID NO: 1, 70, and/or 75, but rather necessarily also includes any other polynucleotide that may include this sequence, or a portion of this sequence surrounding this polymorphic locus.

[0158] The term “nucleotide position 89,853” is meant to refer to the allele at the polymorphic locus located at nucleotide 89,853 of SEQ ID NO: 1, 71, and/or 75. One skilled in the art would recognize that reference to this allele is not limited to only SEQ ID NO: 1, 71, and/or 75, but rather necessarily also includes any other polynucleotide that may include this sequence, or a portion of this sequence surrounding this polymorphic locus.

[0159] The term “nucleotide position 94,074” is meant to refer to the allele at the polymorphic locus located at nucleotide 94,074 of SEQ ID NO: 1, 72, and/or 75. One skilled in the art would recognize that reference to this allele is not limited to only SEQ ID NO: 1, 72, and/or 75, but rather necessarily also includes any other polynucleotide that may include this sequence, or a portion of this sequence surrounding this polymorphic locus.

[0160] The term “nucleotide position 87,712” is meant to refer to the allele at the polymorphic locus located at nucleotide 87,712 of SEQ ID NO: 1, 73, and/or 75. One skilled in the art would recognize that reference to this allele is not limited to only SEQ ID NO: 1, 73 and/or 75, but rather necessarily also includes any other polynucleotide that may include this sequence, or a portion of this sequence surrounding this polymorphic locus.

[0161] The term “nucleotide position 93,598” is meant to refer to the allele at the polymorphic locus located at nucleotide 93,598 of SEQ ID NO: 1, 74, and/or 75. One skilled in the art would recognize that reference to this allele is not limited to only SEQ ID NO: 1, 74 and/or 75, but rather necessarily also includes any other polynucleotide that may include this sequence, or a portion of this sequence surrounding this polymorphic locus.

[0162] The term “nucleotide position 34,403” is meant to refer to the allele at the polymorphic locus located at nucleotide 34,403 of SEQ ID NO: 3 and/or 4. One skilled in the art would recognize that reference to this allele is not limited to only SEQ ID NO: 3 and/or 4, but rather necessarily also includes any other polynucleotide that may include this sequence, or a portion of this sequence surrounding this polymorphic locus.

[0163] The term “nucleotide position 24,707” is meant to refer to the polymorphic locus located at nucleotide 24,707 of SEQ ID NO: 5, 6, and/or 12. One skilled in the art would recognize that reference to this allele is not limited to only SEQ ID NO: 5, 6 and/or 12, but rather necessarily also includes any other polynucleotide that may include this sequence, or a portion of this sequence surrounding this polymorphic locus.

[0164] The term “nucleotide position 34,078” is meant to refer to the polymorphic locus located at nucleotide 34,078 of SEQ ID NO: 5, 7, and/or 12. One skilled in the art would recognize that reference to this allele is not limited to only SEQ ID NO: 5, 7, and/or 12, but rather necessarily also includes any other polynucleotide that may include this sequence, or a portion of this sequence surrounding this polymorphic locus.

[0165] The term “nucleotide position 35,799” is meant to refer to the polymorphic locus located at nucleotide 35,799 of SEQ ID NO: 5, 8. and/or 12. One skilled in the art would recognize that reference to this allele is not limited to only SEQ ID NO: 5, 8, and/or 12, but rather necessarily also includes any other polynucleotide that may include this sequence, or a portion of this sequence surrounding this polymorphic locus.

[0166] The term “nucleotide position 38,709” is meant to refer to the polymorphic locus located at nucleotide 38,709 of SEQ ID NO: 5, 9, and/or 12. One skilled in the art would recognize that reference to this allele is not limited to only SEQ ID NO: 5, 9, and/or 12, but rather necessarily also includes any other polynucleotide that may include this sequence, or a portion of this sequence surrounding this polymorphic locus.

[0167] The term “nucleotide position 38,947” is meant to refer to the polymorphic locus located at nucleotide 38,947 of SEQ ID NO: 5, 10, and/or 12. One skilled in the art would recognize that reference to this allele is not limited to only SEQ ID NO: 5, 10, and/or 12, but rather necessarily also includes any other polynucleotide that may include this sequence, or a portion of this sequence surrounding this polymorphic locus.

[0168] The term “nucleotide position 41,180” is meant to refer to the polymorphic locus located at nucleotide 41,108 of SEQ ID NO: 5, 11, and/or 12. One skilled in the art would recognize that reference to this allele is not limited to only SEQ ID NO: 5, 11, and/or 12, but rather necessarily also includes any other polynucleotide that may include this sequence, or a portion of this sequence surrounding this polymorphic locus.

[0169] The term “biological sample” refers to any biological sample obtained from an organism, body fluids, cell lines, tissue culture, or other source that contains the nucleic acid, polypeptide, or mRNA of the invention. As indicated, biological samples include body fluids (such as the following non-limiting examples, sputum, amniotic fluid, urine, saliva, breast milk, secretions, interstitial fluid, blood, serum, spinal fluid, etc.) that contain the nucleic acid or polypeptide of the invention, and other tissue sources found to express the polypeptide of the invention. Methods for obtaining tissue biopsies and body fluids from organisms are well known in the art. Where the biological sample is to include mRNA, a tissue biopsy is the preferred source.

[0170] The terms “subject”, “individual”, “patient” and “patient population” as used herein is meant to include any eukaryotic organism, and preferably meant to encompass mammals, in particular humans.

[0171] The term “non-responder” refers to a subject, individual, patient or patient population that demonstrates little or no response to a therapeutically effective amount of a DPP-IV inhibitor or a DPP-IV inhibitor in combination with other oral antidiabetic therapy as measured by appropriate assay, including, but not limited to, those assays provided herein, for example, by measuring the level glycosylated hemoglobin following DPP-IV treatment compared with placebo control.

[0172] The term “super-responder” refers to a subject, individual, patient or patient population that demonstrates substantial response to a therapeutically effective amount of a DPP-IV inhibitor or a DPP-IV inhibitor in combination with other oral antidiabetic therapy as measured by appropriate assay, including, but not limited to, those assays provided herein, for example, by measuring the level of glycosylated hemoglobin following DPP-IV treatment compared with placebo control.

### Polynucleotides and Polypeptides of the Invention

### Features of TEKT SNP—Reference Allele

[0173] The invention provides isolated nucleic acid molecules comprising all or a portion of one or more alleles of the human TEKT5 gene, as provided in SEQ ID NO: 63 (GenBank Accession No.: gi|NC_{—}000015.8). The allele described in SEQ ID NO: 63 represents the reference allele for this SNP and is exemplified by a “T” at nucleotide position 26,472 of SEQ ID NO: 63. The reference allele described in SEQ ID NO: 1 can also be exemplified by the complementary nucleotide “A” at position 26,472. Fragments of this polynucleotide are at least about 10 nucleotides, at least about 20 nucleotides, at least about 40 nucleotides, or at least about 100 contiguous nucleotides and comprise the reference allele at the nucleotide position 26,472 in SEQ ID NO: 63.

[0174] The invention provides methods for determining whether an individual is more likely to have a favorable response to a therapeutically-effective amount of a DPP-IV inhibitor or a DPP-IV inhibitor in combination with other oral antidiabetic therapy. In certain embodiments, the methods comprise the step of identifying the nucleotide present at nucleotide position 26,472 of SEQ ID NO: 63, from a nucleic acid sample to be assessed, or the corresponding nucleotide at this position if only a fragment of the sequence provided as SEQ ID NO: 63 is assessed. The presence of the reference allele (“T” allele) at said position indicates that the individual from whom said nucleic acid sample or fragment was obtained is more likely to have a favorable response to a therapeutically-effective amount of a DPP-IV inhibitor or a DPP-IV inhibitor in combination with other oral antidiabetic therapy or DPP-IV inhibitor in combination with other oral anti-diabetic therapy (e.g., metformin, TZD, or glyburide). compared to an individual having the variant allele (“C” allele) at this position.

[0175] Importantly, the presence of the reference allele at said position in a nucleic acid sample provided by an individual indicates that said individual is more likely to have a favorable response to the administration of a correspondingly lower amount of a DPP-IV inhibitor or a DPP-IV inhibitor in combination with other oral antidiabetic therapy or DPP-IV inhibitor in combination with other oral anti-diabetic therapy relative to another individual having the variant allele(s) at said position. Therefore, such individuals may be candidates to have the level of administered DPP-IV inhibitor “titrated-down”.

[0176] Representative disorders that can be detected, diagnosed, identified, treated, prevented, and/or ameliorated by analysis of the TEKT5 SNPs (e.g., SEQ ID NOs: 63 and 64 and fragments and complements thereof) using the methods of this invention include, but are not limited to, the following diseases and disorders: DPP-IV abnormalities, susceptibility to developing DPP-IV abnormalities, diabetes, disorders associated with aberrant TEKT5 expression, disorders associated with aberrant TEKT5 regulation, disorders associated with aberrant TEKT5 activity, disorders associated with aberrant HbA1c levels, disorders associated with elevated HbA1c plasma/serum levels, diabetes, type II diabetes, complications of diabetes, including retinopathy, neuropathy, nephropathy and delayed wound healing, diseases related to diabetes including insulin resistance, impaired glucose homeostatis, hyperglycaemia, hyperinsulinemia, elevated blood levels of fatty acids or glycerol, obesity, hyperlipidemia including hypertriglyceridemia, Syndrome X, atherosclerosis, and hypertension, among others.

### Features of TEKT SNP—Variant Allele

[0177] The invention provides isolated nucleic acid molecules comprising all or a portion of one or more alleles of the human TEKT5 gene, as provided in SEQ ID NO: 64 (GenBank Accession No.: gi|NC_{—}000015.8). The allele described in SEQ ID NO: 64 represents the variant allele for this SNP and is exemplified by a “C” at nucleotide position 26,472 of SEQ ID NO: 64. The variant allele described in SEQ ID NO: 64 can also be exemplified by the complementary nucleotide “G” at position 26,472. Fragments of this polynucleotide are at least about 10 nucleotides, at least about 20 nucleotides, at least about 40 nucleotides, or at least about 100 contiguous nucleotides and comprise the variant allele at the nucleotide position 26,472 in SEQ ID NO: 64.

[0178] The invention further provides methods for determining whether an individual is more likely to have a favorable response to the administration of a therapeutically-effective amount of a DPP-IV inhibitor or a DPP-IV inhibitor in combination with other oral antidiabetic therapy or DPP-IV inhibitor in combination with other oral anti-diabetic therapy. The inventive methods of the invention comprise the step of identifying the nucleotide present at position 26,472 of SEQ ID NO: 64 from a nucleic acid sample to be assessed, or the corresponding nucleotide at this position if only a fragment of the sequence provided as SEQ ID NO: 64 is assessed. The presence of the variant allele (“C” allele) at nucleotide position 26,472 indicates that the individual from whom said nucleic acid sample or fragment was obtained is less likely to have a favorable response to a therapeutically-effective amount of a DPP-IV inhibitor or a DPP-IV inhibitor in combination with other oral antidiabetic therapy compared to an individual having the reference allele at said position.

[0179] Importantly, the presence of the variant allele at said position in a nucleic acid sample provided by an individual indicates that said individual is less likely to have a favorable response to a DPP-IV inhibitor or a DPP-IV inhibitor in combination with other oral antidiabetic therapy or DPP-IV inhibitor in combination with other oral anti-diabetic therapy and that the typical dose may not be sufficient relative to another individual having the reference allele at said position. In addition, the presence of the variant allele at position 26,472 of SEQ ID NO: 64 in a nucleic acid sample can indicate that a higher dose of DPP-IV inhibitor may be required to enable the subject or patient to achieve a favorable response to the administration of a therapeutically-effective amount of a DPP-IV inhibitor or a DPP-IV inhibitor in combination with other oral antidiabetic therapy.

### Features of GRINL1A SNP—Reference Allele

[0180] The invention provides isolated nucleic acid molecules comprising all or a portion of one or more alleles of the human GRINL1A gene, as provided in SEQ ID NO: 1 (GenBank Accession No.: gi|NC_{—}000015.8). The allele(s) described in SEQ ID NO: 1 represents the reference allele(s) for this SNP and is exemplified by a “A” at nucleotide position 87,712, “T” at nucleotide position 87,992, “A” at nucleotide position 89,441, “G” at nucleotide position 89,662, “G” at nucleotide position 89,853, “G” at nucleotide position 93,598, and “T” at nucleotide position 94,074 of SEQ ID NO: 1. The reference allele(s) described in SEQ ID NO: 1 can also be exemplified by the complementary nucleotide at each site, for example, “T” at nucleotide position 24,707, “C” at nucleotide position 34,078, “G” at nucleotide position 35,799, “A” at nucleotide position 38,709, “C” at nucleotide position 38,947 and “T” at nucleotide position 41,180 of SEQ ID NO: 1. Fragments of this polynucleotide are at least about 10 nucleotides, at least about 20 nucleotides, at least about 40 nucleotides, or at least about 100 contiguous nucleotides and comprise the reference allele at the nucleotide position(s) 87,712, 87,992, 89,441, 89,662, 89,853, 93,598, and 94,074 in SEQ ID NO: 1.

[0181] The invention provides methods for predicting whether an individual is more likely to have a favorable response to a therapeutically-effective and pharmaceutically acceptable amount of a DPP-IV inhibitor or a DPP-IV inhibitor in combination with other oral antidiabetic therapy or DPP-IV inhibitor in combination with other oral anti-diabetic therapy. In these embodiments, the methods comprise the step of identifying the nucleotide present at nucleotide position(s) 87,712, 87,992, 89,441, 89,662, 89,853, 93,598, and 94,074 of SEQ ID NO: 1, from a nucleic acid sample to be assessed, or the corresponding nucleotide at this position if only a fragment of the sequence provided as SEQ ID NO: 1 is assessed. The presence of the reference allele(s) at said position(s) indicates that the individual from whom said nucleic acid sample or fragment is more likely to have a favorable response to a therapeutically-effective and pharmaceutically acceptable amount of a DPP-IV inhibitor or a DPP-IV inhibitor in combination with other oral antidiabetic therapy or DPP-IV inhibitor in combination with other oral anti-diabetic therapy compared with an individual having the variant allele at said position.

[0182] Importantly, the presence of the reference allele(s) at said position(s) in a nucleic acid sample provided by an individual indicates that said individual may be more likely to achieve a favorable response to the administration of a correspondingly lower amount of a DPP-IV inhibitor or a DPP-IV inhibitor in combination with other oral antidiabetic therapy or DPP-IV inhibitor in combination with other oral anti-diabetic therapy relative to another individual having the variant allele(s) at said position. Therefore, such individuals may be candidates to have the level of administered DPP-IV inhibitor “titrated-down”.

[0183] Representative disorders that can be detected, diagnosed, identified, treated, prevented, and/or ameliorated by analysis of these SNPs (e.g., SEQ ID NOs: 69-77 and fragments and complements thereof) using the methods of this invention include, but are not limited to, the following diseases and disorders: DPP-IV abnormalities, susceptibility to developing DPP-IV abnormalities, diabetes, disorders associated with aberrant GRINL1A expression, disorders associated with aberrant GRINL1A regulation, disorders associated with aberrant GRINL1A activity, disorders associated with aberrant HbA1c levels, disorders associated with elevated HbA1c plasma/serum levels, diabetes, type II diabetes, complications of diabetes, including retinopathy, neuropathy, nephropathy and delayed wound healing, diseases related to diabetes including insulin resistance, impaired glucose homeostatis, hyperglycaemia, hyperinsulinemia, elevated blood levels of fatty acids or glycerol, obesity, hyperlipidemia including hypertriglyceridemia, Syndrome X, atherosclerosis, and hypertension, among others.

### Features of GRINL1A SNP—Variant Allele

[0184] The invention provides isolated nucleic acid molecules comprising all or a portion of one or more alleles of the human GRINL1A gene, as provided in SEQ ID NO: 2, and 69-75 (GenBank Accession No.: gi|NC_{—}000015.8). The alleles described in SEQ ID NOs: 2 and 69-75 represent the variant alleles for this SNP and are exemplified by an “G” at nucleotide position 87,712 of SEQ ID NO: 73, “C” at nucleotide position 87,992 of SEQ ID NO: 2, “G” at nucleotide position 89,441 of SEQ ID NO: 69, “A” at nucleotide position 89,662 of SEQ ID NO: 70, “A” at nucleotide position 89,853 of SEQ ID NO: 71, “A” at nucleotide position 93,598 of SEQ ID NO: 74, and “C” at nucleotide position 94,074 of SEQ ID NO: 72. The variant allele(s) described in SEQ ID NOs: 2, and 69-75 can also be exemplified by the complementary nucleotide at each site, for example, “C” at nucleotide position 87,712 of SEQ ID NO: 74, “G” at nucleotide position 87,992 of SEQ ID NO: 2, “C” at nucleotide position 89,441 of SEQ ID NO: 69, “T” at nucleotide position 89,662 of SEQ ID NO: 70, “T” at nucleotide position 89,853 of SEQ ID NO: 71, “T” at nucleotide position 93,598 of SEQ ID NO: 74, and “G” at nucleotide position 94,074 of SEQ ID NO: 72. Fragments of this polynucleotide are at least about 10 nucleotides, at least about 20 nucleotides, at least about 40 nucleotides, or at least about 100 contiguous nucleotides and comprise the variant allele at the nucleotide position 87,712 in SEQ ID NO: 73, position 87,992 in SEQ ID NO: 2, position 89,441 in SEQ ID NO: 69, position 89,662 in SEQ ID NO: 70, position 89,853 in SEQ ID NO: 71, position 93,598 in SEQ ID NO: 74, and position 94,074 in SEQ ID NO: 72, or at positions 87,712, 87,992, 89,441, 89,662, 89,853, 93,598, and/or 94,074 in SEQ ID NO: 75.

[0185] The invention also provides methods for predicting the likelihood that an individual will have favorable response to the administration of a therapeutically-effective and pharmaceutically acceptable amount of a DPP-IV inhibitor or a DPP-IV inhibitor in combination with other oral antidiabetic therapy or DPP-IV inhibitor in combination with other oral anti-diabetic therapy. In these embodiments, the methods comprise the step of identifying the nucleotide present at nucleotide position 87,992 of SEQ ID NO: 2, from a nucleic acid sample to be assessed, or the corresponding nucleotide at this position if only a fragment of the sequence provided as SEQ ID NO: 2 is assessed. The presence of the variant allele (“C” allele) at said position indicates that the individual from whom said nucleic acid sample or fragment was obtained is less likely to have a favorable response to a therapeutically-effective and pharmaceutically acceptable amount of a DPP-IV inhibitor or a DPP-IV inhibitor in combination with other oral antidiabetic therapy or DPP-IV inhibitor in combination with other oral anti-diabetic therapy, compared to an individual having the reference allele at said position.

[0186] Importantly, the presence of the variant allele at said position in a nucleic acid sample provided by an individual indicates that said individual is less likely to have a favorable response to a DPP-IV inhibitor or DPP-IV inhibitor in combination with other oral anti-diabetic therapy and that the typical dose may not be sufficient relative to another individual having the reference allele at said position. In addition, the presence of the variant allele at said position in a DNA sample may indicate that a higher dose of DPP-IV inhibitor or a DPP-IV inhibitor in combination with other oral antidiabetic therapy may be required to enable the individual to achieve a favorable response to the administration of a therapeutically-effective and pharmaceutically acceptable amount of a DPP-IV inhibitor or a DPP-IV inhibitor in combination with other oral antidiabetic therapy.

### Features of HSD11B1 SNP—Reference Allele

[0187] The invention provides isolated nucleic acid molecules comprising all or a portion of one or more alleles of the human HSD11B1 gene, as provided in SEQ ID NO:3 (GenBank Accession No.: gi|NC_{—}000001.9). The allele described in SEQ ID NO: 3 represents the reference allele for this SNP and is exemplified by a “C” at nucleotide position 34,403 of SEQ ID NO: 3. The reference allele described in SEQ ID NO: 3 can also be exemplified by the complementary nucleotide “G” at position 34,403. Fragments of this polynucleotide are at least about 10 nucleotides, at least about 20 nucleotides, at least about 40 nucleotides, or at least about 100 contiguous nucleotides and comprise the reference allele at the nucleotide position 34,403 in SEQ ID NO: 3.

[0188] The invention provides methods for predicting whether an individual will have an increased likelihood of achieving a favorable response to a therapeutically-effective and pharmaceutically acceptable amount of a DPP-IV inhibitor or a DPP-IV inhibitor in combination with other oral antidiabetic therapy. In these embodiments, the methods comprise the step of identifying the nucleotide present at nucleotide position 34,403 of SEQ ID NO: 3, from a nucleic acid sample to be assessed, or the corresponding nucleotide at this position if only a fragment of the sequence provided as SEQ ID NO: 3 is assessed. The presence of the reference allele (“C” allele) at said position indicates that the individual from whom the nucleic acid sample or fragment was obtained is more likely to have a favorable response to a therapeutically-effective and pharmaceutically acceptable amount of a DPP-IV inhibitor or a DPP-IV inhibitor in combination with other oral antidiabetic therapy compared with an individual having the variant allele at said position.

[0189] Importantly, the presence of the reference allele at said position in a nucleic acid sample provided by an individual indicates that said individual is more likely to have a favorable response to the administration of a correspondingly lower amount of a DPP-IV inhibitor or a DPP-IV inhibitor in combination with other oral antidiabetic therapy relative to another individual having the variant allele(s) at said position. Therefore, such individuals may be candidates to have the level of administered DPP-IV inhibitor “titrated-down”.

[0190] Representative disorders that can be detected, diagnosed, identified, treated, prevented, and/or ameliorated by analysis of these SNPs (e.g., SEQ ID NOs: 3 and 4 and fragments and complements thereof) using the methods of this invention include, but are not limited to, the following diseases and disorders: DPP-IV abnormalities, susceptibility to developing DPP-IV abnormalities, diabetes, disorders associated with aberrant HSD11B1 expression, disorders associated with aberrant HSD11B1 regulation, disorders associated with aberrant HSD11B1 activity, disorders associated with aberrant HbA1c levels, disorders associated with elevated HbA1c plasma/serum levels, diabetes, type II diabetes, complications of diabetes, including retinopathy, neuropathy, nephropathy and delayed wound healing, diseases related to diabetes including insulin resistance, impaired glucose homeostatis, hyperglycaemia, hyperinsulinemia, elevated blood levels of fatty acids or glycerol, obesity, hyperlipidemia including hypertriglyceridemia, Syndrome X, atherosclerosis, and hypertension, among others.

### Features of HSD11B1 SNP—Variant Allele

[0191] The invention provides isolated nucleic acid molecules comprising all or a portion of one or more alleles of the human HSD11B1 gene, as provided in SEQ ID NO:4 (GenBank Accession No.: gi|NC_{—}000001.9). The allele described in SEQ ID NO: 4 represents the variant allele for this SNP and is exemplified by a “T” at nucleotide position 34,403 of SEQ ID NO: 4. The variant allele described in SEQ ID NO: 4 can also be exemplified by the complementary nucleotide “A” at position 34,403. Fragments of this polynucleotide are at least about 10 nucleotides, at least about 20 nucleotides, at least about 40 nucleotides, or at least about 100 contiguous nucleotides and comprise the variant allele at the nucleotide position 34,403 in SEQ ID NO: 4.

[0192] The invention also provides methods for predicting the likelihood that an individual will have a favorable response to the administration of a therapeutically-effective amount of a DPP-IV inhibitor or a DPP-IV inhibitor in combination with other oral antidiabetic therapy. In these embodiments, the methods comprise the step of identifying the nucleotide present at nucleotide position 34,403 of SEQ ID NO: 4, from a nucleic acid sample to be assessed, or the corresponding nucleotide at this position if only a fragment of the sequence provided as SEQ ID NO: 4 is assessed. The presence of the variant allele (“T” allele) at said position indicates that the individual from whom said nucleic acid sample or fragment was obtained is less likely to have a favorable response to a therapeutically-effective amount of a DPP-IV inhibitor or a DPP-IV inhibitor in combination with other oral antidiabetic therapy, compared to an individual having the reference allele at said position.

[0193] Importantly, the presence of the variant allele at said position in a nucleic acid sample provided by an individual indicates that said individual is less likely to have a favorable response to a DPP-IV inhibitor or a DPP-IV inhibitor in combination with other oral antidiabetic therapy and that the typical dose may not be sufficient relative to another individual having the reference allele at said position. In addition, the presence of the variant allele at said position in a nucleic acid sample may indicate that a higher dose of DPP-IV inhibitor may be required to enable the individual to achieve a favorable response to the administration of a therapeutically-effective amount of a DPP-IV inhibitor or a DPP-IV inhibitor in combination with other oral antidiabetic therapy.

### Features of CHST10 SNPs—Reference Allele

[0194] The invention provides isolated nucleic acid molecules comprising all or a portion of one or more alleles of the human CHST10 gene, as provided in SEQ ID NO:5 (GenBank Accession No.: gi|NC_{—}000002.10). The allele(s) described in SEQ ID NO: 5 represents the reference allele(s) for this SNP and is exemplified by a “G” at nucleotide position 24,707, “C” at nucleotide position 34,078, “G” at nucleotide position 35,799, “A” at nucleotide position 38,709, “C” at nucleotide position 38,947 and “T” at nucleotide position 41,180 of SEQ ID NO: 5. The reference allele(s) described in SEQ ID NO: 5 can also be exemplified by the complementary nucleotide at each site, for example, “C” at nucleotide position 24,707, “G” at nucleotide position 34,078, “C” at nucleotide position 35,799, “T” at nucleotide position 38,709, “G” at nucleotide position 38,947 and “A” at nucleotide position 41,180 of SEQ ID NO: 5. Fragments of this polynucleotide are at least about 10 nucleotides, at least about 20 nucleotides, at least about 40 nucleotides, or at least about 100 contiguous nucleotides and comprise the reference allele at the nucleotide position(s) 24,707, 34,078, 35,799, 38,709, 38,947, and 41,180 in SEQ ID NO: 5.

[0195] The invention provides methods for predicting whether an individual will have an increased likelihood of achieving a favorable response to a therapeutically-effective and pharmaceutically acceptable amount of a DPP-IV inhibitor or a DPP-IV inhibitor in combination with other oral antidiabetic therapy. In these embodiments, the methods comprise the step of identifying the nucleotide present at nucleotide position(s) 24,707, 34,078, 35,799, 38,709, 38,947, and 41,180 of SEQ ID NO: 5, from a nucleic acid sample to be assessed, or the corresponding nucleotide at this position if only a fragment of the sequence provided as SEQ ID NO: 5 is assessed. The presence of the reference allele(s) at said position(s) indicates that the individual from whom said nucleic acid sample or fragment was obtained is more likely to have a favorable response to a therapeutically-effective and pharmaceutically acceptable amount of a DPP-IV inhibitor or a DPP-IV inhibitor in combination with other oral antidiabetic therapy compared with an individual having the variant allele at said position.

[0196] Importantly, the presence of the reference allele(s) at said position(s) in a nucleic acid sample provided by an individual indicates that said individual is more likely to have a favorable response to the administration of a correspondingly lower amount of a DPP-IV inhibitor or a DPP-IV inhibitor in combination with other oral antidiabetic therapy relative to another individual having the variant allele(s) at said position. Therefore, such individuals may be candidates to have the level of administered DPP-IV inhibitor “titrated-down”.

[0197] Representative disorders that can be detected, diagnosed, identified, treated, prevented, and/or ameliorated by analysis of these SNPs (e.g., SEQ ID NOs: 5-12 and fragments and complements thereof) using the methods of this invention include, but are not limited to, the following diseases and disorders: DPP-IV abnormalities, susceptibility to developing DPP-IV abnormalities, diabetes, disorders associated with aberrant CHST10 expression, disorders associated with aberrant CHST10 regulation, disorders associated with aberrant CHST10 activity, disorders associated with aberrant HbA1c levels, disorders associated with elevated HbA1c plasma/serum levels, diabetes, type II diabetes, complications of diabetes, including retinopathy, neuropathy, nephropathy and delayed wound healing, diseases related to diabetes including insulin resistance, impaired glucose homeostatis, hyperglycaemia, hyperinsulinemia, elevated blood levels of fatty acids or glycerol, obesity, hyperlipidemia including hypertriglyceridemia, Syndrome X, atherosclerosis, and hypertension, among others.

### Features of CHST10 SNPs—Variant Alleles

[0198] The invention provides isolated nucleic acid molecules comprising all or a portion of one or more alleles of the human CHST10 gene, as provided in SEQ ID NO: 6-11 (GenBank Accession No.: gi|NC_{—}000002.10). The alleles described in SEQ ID NOs: 6-11 represent the variant alleles for this SNP and are exemplified by an “A” at nucleotide position 24,707 of SEQ ID NO: 6, “T” at nucleotide position 34,078 of SEQ ID NO: 7, “C” at nucleotide position 35,799 of SEQ ID NO: 8, “G” at nucleotide position 38,709 of SEQ ID NO: 9, “A” at nucleotide position 38,947 of SEQ ID NO: 10, and “C” at nucleotide position 41,180 of SEQ ID NO: 11. The variant allele(s) described in SEQ ID NOs: 6-11 can also be exemplified by the complementary nucleotide at each site, for example, “T” at nucleotide position 24,707 of SEQ ID NO: 6, “A” at nucleotide position 34,078 of SEQ ID NO: 7, “G” at nucleotide position 35,799 of SEQ ID NO: 8, “C” at nucleotide position 38,709 of SEQ ID NO: 9, “T” at nucleotide position 38,947 of SEQ ID NO: 10, and “G” at nucleotide position 41,180 of SEQ ID NO: 11. Fragments of this polynucleotide are at least about 10 nucleotides, at least about 20 nucleotides, at least about 40 nucleotides, or at least about 100 contiguous nucleotides and comprise the variant allele at the nucleotide position 24,707 in SEQ ID NO: 6, position 34,078 in SEQ ID NO: 7, position 35,799 in SEQ ID NO: 8, position 38,709 in SEQ ID NO: 9, position 38,947 in SEQ ID NO: 10 and position 41,180 in SEQ ID NO: 11, or at positions 24,707, 34,078, 35,799, 38,709, 38,947, 41,180 in SEQ ID NO: 12.

[0199] The invention also provides methods for predicting the likelihood that an individual will have favorable response to the administration of a therapeutically-effective and pharmaceutically acceptable amount of a DPP-IV inhibitor or a DPP-IV inhibitor in combination with other oral antidiabetic therapy. In these embodiments, the methods comprise the step of identifying the nucleotide present at nucleotide position 24707 of SEQ ID NO: 6, from a nucleic acid sample to be assessed, or the corresponding nucleotide at this position if only a fragment of the sequence provided as SEQ ID NO: 6 is assessed. The presence of the variant allele (“A” allele) at said position indicates that the individual from whom said nucleic acid sample or fragment was obtained has a decreased is less likely to have a favorable response to a therapeutically-effective and pharmaceutically acceptable amount of a DPP-IV inhibitor or a DPP-IV inhibitor in combination with other oral antidiabetic therapy, compared to an individual having the reference allele at said position.

[0200] Importantly, the presence of the variant allele at said position in a nucleic acid sample provided by an individual indicates that said individual is less likely to have a favorable response to a DPP-IV inhibitor or a DPP-IV inhibitor in combination with other oral antidiabetic therapy and that the typical dose may not be sufficient relative to another individual having the reference allele at said position. In addition, the presence of the variant allele at said position in a DNA sample may indicate that a higher dose of DPP-IV inhibitor or a DPP-IV inhibitor in combination with other oral antidiabetic therapy may be required to enable the individual to achieve a favorable response to the administration of a therapeutically-effective and pharmaceutically acceptable amount of a DPP-IV inhibitor or a DPP-IV inhibitor in combination with other oral antidiabetic therapy.

### Polynucleotides

[0201] The invention provides a polynucleotide comprising the sequence identified as SEQ ID NO: 63 and/or 64 for the TEKT5 gene, SEQ ID NOs: 1, 2 and 69-75 for the GRINL1A gene, SEQ ID NO: 3 and/or 4 for the HSD11B1 gene, and SEQ ID NOs: 5-12 for the CHST10 gene; or a fragment containing the polymorphic allele, wherein said fragment comprises at least 10 contiguous nucleotides of SEQ ID NOs: 1, 2 and 69-75 for the GRINL1A gene, at least 10 contiguous nucleotides of SEQ ID NO: 3 and/or 4 for the HSD11B1 gene, and at least 10 contiguous nucleotides of SEQ ID NOs: 5-12 for the CHST10 gene.

TABLE I

| | | | Nucleotide | | | |
|---|---|---|---|---|---|---|
| | Number of | | Position of | | Nucleotide at | |
| | Polymorphic | | Polymorphic | | Polymorphic | SEQ ID |
| Gene | Loci | SNP | Locus | Allele | Locus | NO: |
| TEKT5 | 1 | SNP_A-2222802 | 26472 | Reference | T | 63 |
| | | (rs2541508) | | Variant | C | 64 |
| GRINL1A | 7 | SNP_A2276140 | 87992 | Reference | T | 1 |
| | | (rs11853270) | | Variant | C | 2 |
| | | SNP_A2276140 | 89322 | Reference | A | 1 |
| | | (rs4774281) | | Variant | G | 69 |
| | | SNP_A2276140 | 89543 | Reference | G | 1 |
| | | (rs8037000) | | Variant | A | 70 |
| | | SNP_A2276140 | 89734 | Reference | G | 1 |
| | | (rs6493943) | | Variant | A | 71 |
| | | SNP_A2276140 | 93995 | Reference | G | 1 |
| | | (rs4774282) | | Variant | C | 72 |
| | | SNP2 | 87593 | Reference | A | 1 |
| | | | | Variant | G | 73 |
| | | SNP12 | 93479 | Reference | G | 1 |
| | | | | Variant | A | 74 |
| HSD11B1 | 1 | SNP_A-4283459 | 34403 | Reference | C | 3 |
| | | (rs17015076) | | Variant | T | 4 |
| CHST10 | 6 | SNP_A-2295278 | 24707 | Reference | G | 5 |
| | | (rs1370627) | | Variant | A | 6 |
| | | SNP_A-1908426 | 34078 | Reference | C | 5 |
| | | (rs6716367) | | Variant | T | 7 |
| | | SNP_A-1872327 | 35799 | Reference | G | 5 |
| | | (rs7585898) | | Variant | C | 8 |
| | | SNP_A-1810168 | 38709 | Reference | A | 5 |
| | | (rs17024136) | | Variant | G | 9 |
| | | SNP_A-1861179 | 38947 | Reference | C | 5 |
| | | (rs17024129) | | Variant | A | 10 |
| | | SNP_A-4205974 | 41180 | Reference | T | 5 |
| | | (rs7574684) | | Variant | C | 11 |

[0202] In certain embodiments, the invention is directed to a polynucleotide comprising the sequence identified as SEQ ID NO: 63 and/or 64 for the TEKT5 gene, SEQ ID NOs: 1 and/or 2, 69-75 for the GRINL1A gene, SEQ ID NO: 3 and/or 4 for the HSD11B1 gene, or SEQ ID NO: 5 and/or 6-12 for the CHST10 gene which is less than, or equal to, a polynucleotide sequence that is 5 mega basepairs, 1 mega basepairs, 0.5 mega basepairs, 0.1 mega basepairs, 50,000 basepairs, 20,000 basepairs, or 10,000 basepairs in length.

[0203] The invention further provides polynucleotides with sequences complementary to those of the polynucleotides of the invention as disclosed herein. Such sequences can be complementary to the sequence disclosed as SEQ ID NO: 63 and/or 64 for the TEKT5 gene, SEQ ID NOs: 1 and/or 2, 69-75 for the GRINL1A gene, SEQ ID NO: 3 and/or 4 for the HSD11B1 gene, and SEQ ID NO: 5 and/or 6-12 for the CHST10 gene.

[0204] The invention further provides fragments of polynucleotides comprising the sequence identified as SEQ ID NO: 63 and/or 64 for the TEKT5 gene, SEQ ID NOs: 1 and/or 2, 69-75 for the GRINL1A gene, SEQ ID NO: 3 and/or 4 for the HSD11B1 gene, and/or SEQ ID NO: 5 and/or 6-12 for the CHST10 gene, as well as the complementary sequences thereof.

[0205] The invention encompasses the application of Polymerase Chain Reaction (PCR) methodology to the polynucleotide sequences of the invention, and/or cDNA encoding the polypeptides of the invention. PCR techniques for the amplification of nucleic acids are described inter alia in U.S. Pat. No. 4,683,195 and Saiki et al., 1988, Science, 239:487-491. PCR, for example, can include the following steps: denaturation of template nucleic acid (if double-stranded), annealing of primer to target, and polymerization. The nucleic acid template in the amplification reaction can be genomic DNA, cDNA, RNA, or a PNA. PCR can be used to amplify specific sequences from genomic DNA, specific RNA sequences (converted to cDNA), and/or cDNA transcribed from mRNA. References for the general use of PCR techniques, including specific method parameters, include Mullis et al., 1987, Cold Spring Harbor Symp. Quant. Biol., 51:263, Ehrlich (ed), 1989, PCR Technology, Stockton Press, NY; Ehrlich et al., 1991, Science, 252:1643-1650; and “PCR Protocols, A Guide to Methods and Applications”, Eds., Innis et al., Academic Press, New York, (1990).

### Polynucleotide Variants

[0206] The invention also encompasses other sequence variants of the polynucleotide sequences described herein, e.g., SEQ ID NO: 63 and/or 64 for the TEKT5 gene, SEQ ID NOs: 1 and/or 2, 69-75 for the GRINL1A gene, SEQ ID NO: 3 and/or 4 for the HSD11B1 gene, and/or SEQ ID NOs: 5-12 for the CHST10 gene, as well as the complementary sequences thereto and fragments thereof. The term “polynucleotide variant” (as distinguished from the term “variant allele”) refers to a polynucleotide having a nucleotide sequence that shares substantial sequence homology with but is not identical with the sequence of the polynucleotide of the invention. For example, the polynucleotide variant has at least 80% sequence homology with, preferably at least 90% sequence homology, and more preferably 95% sequence homology with the sequence of the polynucleotide of the invention and retains the essential properties and characteristics thereof. Generally, the sequences of polynucleotide variants are overall closely similar, and, in many regions, identical to the sequence of the polynucleotide of the invention.

[0207] In other embodiments, the invention encompasses nucleic acid molecules that comprise a polynucleotide that hybridizes under stringent conditions, or alternatively, under lower stringency conditions, to a polynucleotide sequence of SEQ ID NOs: 1-12, 63-64, and 69-75. Polynucleotides that hybridize to the complement of these nucleic acid molecules under stringent hybridization conditions or alternatively, under lower stringency conditions, are also encompassed by the invention.

[0208] As is known in the art, typically, hybridization is said to be carried out under a) high stringency conditions if the incubation temperature of the hybridization reaction is lower than Melting Temperature (Tm) by less than or equal to 15 degree, b) moderate stringency conditions if the incubation temperature of the hybridization reaction is lower than Tm by 15-25 degree, and c) low stringency conditions if the incubation temperature of the hybridization reaction is lower than Tm by 25-35 degree. (Handout of Adv. Mol. Biol. Sep. 13, 2004, Florida State University). For washing, a higher stringency wash is typically done at 65° C. in 0.1×SSC, 0.1% SDS and a lower stringency wash is typically done at 60° C. in 2×SSC, 0.1% SDS. (Nucleic Acid Hybridization, A Practical Approach, Hames & Higgins, IPL Press, p. 97).

### Polynucleotide Fragments

[0209] The invention is directed to polynucleotide fragments of the polynucleotides of the invention, and polynucleotide sequences that hybridize thereto.

[0210] According to the invention, a “polynucleotide fragment” refers to a polynucleotide having a nucleic acid sequence that is a portion of the nucleic acid having a nucleotide sequence identified by SEQ ID NO: 63 and/or 64 for the TEKT5 gene, SEQ ID NOs: 1 and/or 2, 69-75 for the GRINL1A gene, SEQ ID NO: 3 and/or 4 for the HSD11B1 gene and/or SEQ ID NO: 5 and/or 6-12 for the CHST10 gene, or the complementary strand thereto. The nucleotide fragments of the invention are at least about 15 nucleotides, at least about 20 nucleotides, at least about 30 nucleotides, at least about 40 nucleotides, at least about 50 nucleotides, at least about 75 nucleotides, or at least about 150 nucleotides in length, and comprise at least one polymorphic locus of the gene. Larger fragments (e.g., 50, 150, 500, 600, 2000 nucleotides) as described herein are also included.

[0211] A fragment “at least 20 nucleotide in length,” for example, is intended to include 20 or more contiguous nucleotides from the nucleic acid sequence shown in SEQ ID NO: 63 and/or 64 for the TEKT5 gene, SEQ ID NOs: 1 and/or 2, 69-75 for the GRINL1A gene, SEQ ID NO: 3 and/or 4 for the HSD11B1 gene, and SEQ ID NO: 5 and/or 6-12 for the CHST10 gene, and the complementary sequences thereof. As used herein, the term “about” includes the particularly recited value, a value larger or smaller by several (5, 4, 3, 2, or 1) nucleotides, at either terminus, or at both termini. The nucleotide fragments have uses that include, but are not limited to, diagnostic probes and primers as discussed herein.

[0212] Moreover, representative examples of polynucleotide fragments of the invention, include, for example, isolated fragments comprising a sequence from about nucleotide number 1-50, 51-100, 101-150, 151-200, 201-250, 251-300, 301-350, 351-400, 401-450, 451-500, 501-550, 551-600, 651-700, 701-750, 751-800, 800-850, 851-900, 901-950, 951-1000, 1001-1050, 1051-1100, 1101-1150, 1151-1200, 1201-1250, 1251-1300, 1301-1350, 1351-1400, 1401-1450, 1451-1500, 1501-1550, 1551-1600, 1601-1650, 1651-1700, 1701-1750, 1751-1800, 1801-1850, 1851-1900, 1901-1950, 1951-2000, or 2001 to the end of SEQ ID NO: 63 and/or 64 for the TEKT5 gene, to the end of SEQ ID NOs: 1 and/or 2, 69-75 for the GRINL1A gene, to the end of SEQ ID NO: 3 and/or 4 for the HSD11B1 gene, and to the end of SEQ ID NO: 5 and/or 6-12 for the CHST10 gene, or the complementary strand thereto. The fragments can encode a polypeptide that has biological activity. The polynucleotide fragments can be used as probes or primers as discussed herein.

[0213] Also encompassed by the invention are variant polynucleotides that hybridize to polynucleotide fragments described here under stringent hybridization conditions or lower stringency conditions, which conditions have been previously provide herein.

### Kits

[0214] The invention provides kits that can be used in the methods described herein. For example, the invention provides kits comprising at least one reagent for identifying which allelic form (i.e., reference or variant allele) of the SNPs identified herein is present in a biological sample. In certain embodiments, the kit can be used to determine whether the biological sample contains a reference or variant nucleotide (allele) at one or more polymorphic loci, including a polymorphic locus of a TEKT5, GRINL1A, HSD11B1 or CHST10 gene (for example, a polymorphic locus found in SEQ ID NOs: 1-12, 63-64, and 69-75). In specific embodiments, the kit can be used to determine whether the sample contains a reference or variant nucleotide (allele) at one or more of the following: nucleotide position 26,472 of SEQ ID NOs: 63 and 64 for the TEKT5 gene, nucleotide position 87,712 of SEQ ID NOs: 1, 73 and/or 75, nucleotide position 87,992 of SEQ ID NOs: 1, 2 and/or 75, nucleotide position 89,441 of SEQ ID NOs: 1, 69 and/or 77, nucleotide position 89,662 of SEQ ID NOs: 1, 70 and/or 75, nucleotide position 89,853 of SEQ ID NOs: 1, 71 and/or 75, nucleotide position 93,598 of SEQ ID NOs: 1, 74 and/or 75, and nucleotide position 94,074 of SEQ ID NOs: 1, 72 and/or 75 for the GRINL1A gene, nucleotide position 34,403 of SEQ ID NOs: 3 and 4 for the HSD11B1 gene, and nucleotide position 24,707 of SEQ ID NOs: 5, 6 and/or 12, nucleotide position 34,078 of SEQ ID NOs: 5, 7 and/or 12, nucleotide position 35,799 of SEQ ID NOs: 5, 8 and/or 12, nucleotide position 38,709 of SEQ ID NOs: 5, 9 and/or 12, nucleotide position 38,947 of SEQ ID NOs: 5, 10 and/or 12, and nucleotide position 41,180 of SEQ ID NOs: 5, 11 and/or 12 for the CHST10 gene.

[0215] For example, kits of the invention can comprise at least one antibody specific for a particular protein or peptide encoded by one allelic form of the gene, including antibodies specific for a protein or peptide encoded by any of the polynucleotides of SEQ ID NOs: 1-12, 63-64, and 69-75.

[0216] In certain embodiments, the oligonucleotides provided in the kits hybridize to a nucleic acid sequence that spans a polymorphic locus (i.e., SNP-containing fragment) found in a human TEKT5, GRINL1A, HSD11B1, or CHST10 gene. In particular embodiments, oligonucleotides are provided that hybridize to a nucleic acid sequence that spans a polymorphic locus found in SEQ ID NOs: 1, 3, 5, or 63 including, for example, a nucleic acid sequence that spans the polymorphic locus containing a reference allele at nucleotide position 26,472 of SEQ ID NO: 63, a nucleic acid sequence(s) that spans the polymorphic locus containing a reference allele at nucleotide position(s) 87,712, 87,992, 89,441, 89,662, 89,853, 93,598, and/or 94,074 of SEQ ID NO: 1, a nucleic acid sequence that spans the polymorphic locus containing a reference allele at nucleotide position 34,403 of SEQ ID NO: 3, and a nucleic acid sequence(s) that spans the polymorphic locus containing a reference allele at nucleotide position(s) 24,707, 34,078, 35,799, 38,709, 38,947, and/or 41,180 of SEQ ID NO: 5. In certain other embodiments, oligonucleotides are provided that hybridize to a nucleic acid sequence that spans a polymorphic locus found in SEQ ID NOs: 2, 4, 6-12, 64, or 69-75 including, for example, a nucleic acid sequence that spans the polymorphic locus containing a variant allele at nucleotide position 26,472 of SEQ ID NO: 64, a nucleic acid sequence(s) that spans the polymorphic locus containing a variant allele at nucleotide position 87,712, 87,992, 89,441, 89,662, 89,853, 93,598, 94,074 of SEQ ID NOs: 73, 2, 69, 70, 71, 74, and 72, respectively (or at one or more positions 87,712, 87,992, 89,441, 89,662, 89,853, 93,598, 94,074 of SEQ ID NO: 75), a nucleic acid sequence that spans the polymorphic locus containing a variant allele at nucleotide position 34,403 of SEQ ID NO: 4, and a nucleic acid sequence that spans the polymorphic locus containing a variant allele at nucleotide position 24,707, 34,078, 35,799, 38,709, 38,947, 41,180 of SEQ ID NOs: 6, 7, 8, 9, 10 and 11, respectively (or at one or more positions 24,707, 34,078, 35,799, 38,709, 38,947, 41,180 of SEQ ID NO: 12). In other particular embodiments, the oligonucleotides provided in the kits comprise any of SEQ ID NOs: 13-44 and 65-99.

[0217] The invention also provides kits comprising at least one reagent for amplifying an allelic form of one or more of the SNPs identified herein. In further embodiments, the invention provides kits comprising at least one reagent for sequencing an allelic form of one or more of the SNPs identified herein. Thus, the kits can comprise one or more pairs of allele-specific oligonucleotides capable of hybridizing to different forms of a polymorphism as described herein, including, for example, oligonucleotides that hybridize to a nucleic acid sequence comprising at least one polymorphic locus, in addition to the complement of said nucleic acid sequence. These oligonucleotides can be probes or primers, for example, oligonucleotide primers used to amplify a nucleic acid sequence across a polymorphic locus and oligonucleotide primers used to sequence the amplified nucleic acid sequences.

[0218] In certain embodiments, the kits of the invention comprise a single primer or probe of the invention, providing means to detect at least one polymorphic locus, said means preferably comprising a purified primer or probe, in one or more containers. Such a primer or probe can further comprise a detectable label such as a fluorescent compound, an enzymatic substrate, a luminescent compound, a fluorophore, and/or a fluorophore linked to a terminator contained therein. Such a kit can further comprise reagents required to enable adequate hybridization of said single primer or probe to a nucleic acid test sample, such that under suitable conditions, the primer or probe is capable of binding to said nucleic acid in the test sample and signaling whether the variant or reference allele at the polymorphic locus is present in said test sample.

[0219] In other embodiments, the allele-specific oligonucleotides provided in the kits are immobilized to a substrate. Optional additional components of the kit include, for example, reagents, buffers, restriction enzymes, reverse-transcriptase or polymerase, nucleoside triphosphates, means used to label (for example, an avidin-enzyme conjugate and enzyme substrate and chromogen if the label is biotin; fluorophores, chromophores or other labels as described herein), and the appropriate buffers for reverse transcription, PCR, or hybridization reactions.

[0220] In addition, the kits of the invention can provide an assay system for carrying out the method of identifying which allelic form (i.e., reference or variant allele) of the SNPs identified herein is present in a sample. Such kits generally include a support with surface-bound oligonucleotides, and a reporter for detecting hybridization of said oligonucleotide to a test polynucleotide.

[0221] In certain embodiments, the kits comprise a solid support to which are affixed oligonucleotides comprising at least 10 contiguous nucleotides of SEQ ID NO: 63 or 64 for the TEKT5 gene, SEQ ID NO: 1, 2 or 69-75 for the GRINL1A gene, SEQ ID NO: 3 or 4 for the HSD11B1 gene, and/or SEQ ID NO: 5 or 6-12 for the CHST10 gene wherein said oligonucleotide further comprises at least one polymorphic locus of SEQ ID NO: 63 or 64 for the TEKT5 gene, SEQ ID NO: 1, 2 or 69-75 for the GRINL1A gene, SEQ ID NO: 3 or 4 for the HSD11B1 gene, and/or SEQ ID NO: 5 or 6-12 for the CHST10 gene. In such embodiments, a polynucleotide within a sample comprising the same or similar sequence to said oligonucleotide can be detected by hybridization.

[0222] The solid surface reagent is prepared by known techniques for attaching protein material to solid support material, such as polymeric beads, dip sticks, 96-well plate or filter material. These attachment methods generally include non-specific adsorption of the oligonucleotide to the support or covalent attachment of the oligonucleotide to a chemically reactive group on the solid support. Alternatively, streptavidin coated plates can be used in conjunction with biotinylated oligonucleotide(s).

[0223] In certain embodiments, the kits of the invention comprise means for detecting the presence of a polymorphic locus that is a specific allele of at least one polynucleotide in a nucleic acid test sample that serves as a template nucleic acid, for use in methods of the invention comprising: (a) forming an oligonucleotide bound to the polymorphic locus wherein the oligonucleotide comprises a fluorophore linked to a terminator contained therein; and (b) detecting fluorescence polarization of the fluorophore of the fluorescently-labeled oligonucleotide, wherein the oligonucleotide is formed from a primer bound to said nucleic acid sample immediately 3′ to the polymorphic locus and a terminator covalently linked to a fluorophore, and wherein said terminator-linked fluorophore binds to the polymorphic locus and reacts with the primer to produce an extended primer that is said fluorescently labeled oligonucleotide, wherein an increase in fluorescence polarization indicates the presence of the specific allele at the polymorphic locus, thereby detecting the presence of the specific allele at the polymorphic locus by said increase in fluorescence polarization. The kits of the invention can comprise the following non-limiting examples of fluorophores linked to a primer or probe of the invention: 5-carboxyfluorescein (FAM-ddNTPs); 6-carboxy-X-rhodamine (ROX-ddNTPs); N,N,N′,N′-tetramethyl-6-carboxyrhodamine (TMR-ddNTPs); and BODIPY-Texas Red (BTR-ddNTPs).

[0224] In any of the above-described embodiments, the kit also contains instructions for carrying out the methods.

### Methods for Using Allelic Polynucleotides of the Invention

[0225] The determination of the polymorphic form(s) present in an individual at one or more polymorphic sites defined herein can be used in a number of methods.

[0226] Employing the various methods described herein, the polynucleotides of the invention, including allelic and variant forms thereof, can be used to determine whether an individual has a reference allele or a variant allele at one or more polymeric loci found in a TEKT5, GRINL1A, HSD11B1 or CHST10 gene. The determination of the polymorphic form(s) present in an individual at one or more polymorphic sites defined herein can be used in a number of diagnostic and treatment methods as discussed herein.

[0227] Further, employing the various methods described herein, the polynucleotides of the invention, including allelic and variant forms thereof, can be used to test patient populations to determine whether a certain population, such as a particular ethnic population, demonstrates an increased frequency of having either a reference allele or a variant allele at one or more polymeric loci found in a TEKT5, GRINL1A, HSD11B1 or CHST10 gene. The determination of the polymorphic form(s) present in a certain population of individuals, such a particular ethnic population, at one or more polymorphic sites defined herein can be used in diagnostic and treatment methods adapted for that population.

[0228] The polynucleotides of the invention, including allelic and variant forms thereof, have uses that include, but are not limited to, diagnosing individuals to identify whether a given individual is more likely to have a favorable response to the administration of a therapeutically-effective amount of a DPP-IV inhibitor or a DPP-IV inhibitor in combination with other oral antidiabetic therapy. Such diagnosis is particularly useful in designing a specific treatment and dosage regimen customized and optimized for that particular individual. An optimized treatment regimen can not only improve therapeutic outcome, but can also minimize side effects.

[0229] Using the methods and polynucleotides provided herein, such diagnosis is made by determining whether the individual harbors either the reference allele or variant allele at one or more polymorphic loci of a TEKT5, GRINL1A, HSD11B1 or CHST10 gene, wherein an individual harboring the reference allele of a TEKT5, GRINL1A, HSD11B1 or CHST10 gene is more likely to have a favorable response to an administered DPP-IV inhibitor or a DPP-IV inhibitor in combination with other oral antidiabetic therapy compared to an individual harboring the variant allele of a TEKT5, GRINL1A, HSD11B1 or CHST10 gene. For example, in certain embodiments of the invention, the method for determining whether an individual is more likely to have a favorable response to the administration of a therapeutically-effective amount of a DPP-IV inhibitor or a DPP-IV inhibitor in combination with other oral antidiabetic therapy comprises the step of determining whether the individual harbors the reference thymidine allele at position 26,472 of SEQ ID NO: 63 of the TEKT5 gene. In further embodiments of the invention, said method comprises the step of determining whether the individual harbors the reference thymidine allele at position 87,992 of SEQ ID NO: 1, reference adenosine at position 89,441 of SEQ ID NO: 1, reference guanosine at position 89,662 of SEQ ID NO: 1, reference guanosine at position 89,853 of SEQ ID NO: 1, reference guanosine at position 94,074 of SEQ ID NO: 1, reference adenosine at position 87,712 of SEQ ID NO: 1, and reference guanosine at position 93,598 of SEQ ID NO: 1 of the GRINL1A gene. In further embodiments of the invention, said method comprises the step of determining whether the individual harbors the reference cytidine allele at position 34,403 of SEQ ID NO: 3 of the HSD11B1 gene. In yet further embodiments, said method comprises determining whether the individual harbors the reference guanosine allele at position 24,707 of SEQ ID NO: 5, reference cytidine at position 34,078 of SEQ ID NO: 5, reference guanosine at position 35,799 of SEQ ID NO: 5, reference adenosine at position 38,709 of SEQ ID NO: 5, reference cytidine at nucleotide position 38,947 of SEQ ID NO: 5 and reference thymidine at position 41,180 of SEQ ID NO: 5 of the CHST10 gene,

[0230] For those individuals predicted to have a lower likelihood of achieving a favorable response (i.e., those individuals having a variant allele at one or more polymorphic loci of a TEKT5, GRINL1A, HSD11B1 or CHST10 gene), an increased dosage of a DPP-IV inhibitor or a DPP-IV inhibitor in combination with other oral antidiabetic therapy may be warranted. Such a higher level of a therapeutically-effective dose of a DPP-IV inhibitor or a DPP-IV inhibitor in combination with other oral antidiabetic therapy for an individual identified as being less likely to have a favorable response can be, for example, about 5%, 10%, 15%, 20%, 25%, 30%, 35%, 40%, 45%, 50%, 55%, 60%, 65%, 75%, 80%, 85%, 90%, or 95% higher, or 1.5-, 2-, 2.5-, 3-, 3.5-, 4-, 4,5-, or even 5-fold higher than the prescribed or typical dose, as may be the case.

[0231] For those individuals predicted to be more likely to have a favorable response (i.e., those individuals having a reference allele at one or more polymorphic loci of a TEKT5, GRINL1A, HSD11B1 or CHST10 gene), the administration of a correspondingly lower amount of a DPP-IV inhibitor or a DPP-IV inhibitor in combination with other oral antidiabetic therapy relative to another individual having the variant allele(s) at said position may be warranted. Therefore, such individuals may require the level of administered DPP-IV inhibitor or a DPP-IV inhibitor in combination with other oral antidiabetic therapy to be “titrated-down” to achieve a favorable response. Such a lower level of a therapeutically-effective dose of a DPP-IV inhibitor or a DPP-IV inhibitor in combination with other oral antidiabetic therapy for an individual identified as more likely to have a favorable response can be, for example, about 5%, 10%, 15%, 20%, 25%, 30%, 35%, 40%, 45%, 50%, 55%, 60%, 65%, 75%, 80%, 85%, 90%, or 95% lower, or 1.5-, 2-, 2.5-, 3-, 3.5-, 4-, 4,5-, or even 5-fold lower than the prescribed or typical dose, as may be the case.

[0232] The same uses applied to individuals can be applied to patient populations, including particular ethnic populations.

[0233] In other embodiments, the polynucleotides and polypeptides of the invention, including allelic and variant forms thereof, either alone, or in combination with other polymorphic polynucleotides (haplotypes) are useful as genetic markers for predicting whether an individual is more likely to have a favorable response to the administration of a therapeutically-effective amount of a DPP-IV inhibitor or a DPP-IV inhibitor in combination with other oral antidiabetic therapy.

[0234] Additionally, the polynucleotides and polypeptides of the invention, including allelic and/or variant forms thereof, are useful for creating additional antagonists directed against these polynucleotides and polypeptides, which include, but are not limited to the design of antisense RNA, ribozymes, siRNA and miRNA, PNAs, antibodies, recombinant zinc finger proteins (Wolfe et al., 2000, Structure Fold Des. 8:739-50; Kang et al., 2000, J. Biol, Chem. 275:8742-8; Wang et al., 1999, Proc. Natl. Acad. Sci. U.S.A. 96:9568-73; McColl et al., 1999, Proc. Natl. Acad. Sci. U.S.A. 96:9521-6; Segal et al., 1999, Proc. Natl. Acad. Sci. U.S.A. 96:2758-63; Wolfe et al., 1998, J. Molec. Biol. 285:1917-34; Pomerantz et al., 1998, Biochemistry 37:965-70; Leon et al., 2000, Biol. Res. 33:21-30; Berg et al., 1997, Ann. Rev. Biophys. Biomol. Struct. 26:357-71), in addition to other types of antagonists that are either described elsewhere herein, or known in the art.

[0235] The polynucleotides and polypeptides of the invention, including allelic and/or variant forms thereof, are useful for identifying small molecule antagonists directed against the variant forms of these polynucleotides and polypeptides, preferably wherein such small molecules are useful as therapeutic and/or pharmaceutical compounds for treating, detecting, prognosing, and/or preventing the following, nonlimiting diseases and/or disorders: DPP-IV abnormalities, susceptibility to developing DPP-IV abnormalities, diabetes, disorders associated with aberrant TEKT5 expression, disorders associated with aberrant TEKT5 regulation, disorders associated with aberrant TEKT5 activity, disorders associated with aberrant GRINL1A expression, disorders associated with aberrant GRINL1A regulation, disorders associated with aberrant GRINL1A activity, disorders associated with aberrant HSD11B1 expression, disorders associated with aberrant HSD11B1 regulation, disorders associated with aberrant HSD11B1 activity, disorders associated with aberrant CHST10 expression, disorders associated with aberrant CHST10 regulation, disorders associated with aberrant CHST10 activity, disorders associated with aberrant HbA1c levels, disorders associated with elevated HbA1c plasma/serum levels, diabetes, type II diabetes, complications of diabetes, including retinopathy, neuropathy, nephropathy and delayed wound healing, diseases related to diabetes including insulin resistance, impaired glucose homeostatis, hyperglycaemia, hyperinsulinemia, elevated blood levels of fatty acids or glycerol, obesity, hyperlipidemia including hypertriglyceridemia, Syndrome X, atherosclerosis, and hypertension.

[0236] Additional disorders that can be detected, diagnosed, identified, treated, prevented, and/or ameliorated by the SNPs and methods of the invention include, but are not limited to, the following diseases and disorders: diabetic related diseases such as insulin resistance, hyperglycemia, obesity, inflammation, dysmetabolic syndrome, and related diseases. Additional uses of the polynucleotides and polypeptides of the invention are provided herein.

### Haplotype Based Genetic Analysis

[0237] The invention further provides methods for applying the polynucleotides of the invention to the elucidating haplotypes, particularly haplotypes associated with any one or more of the disease conditions referenced elsewhere herein. A “haplotype” is defined as a pattern of a set of alleles of single nucleotide polymorphisms, often along a chromosome. A non-limiting example is three single nucleotide polymorphisms (SNP1, SNP2, and SNP3) in one chromosome region, of which SNP1 is an A/G polymorphism, SNP2 is a G/C polymorphism, and SNP3 is an A/C polymorphism. A and G are the alleles for the first, G and C for the second, and A and C for the third SNP. Given two alleles for each SNP, there are three possible genotypes for individuals at each SNP. For example, for the first SNP, A/A, A/G and G/G are the possible genotypes for individuals. When an individual has a genotype for a SNP in which the alleles are not the same, for example A/G for the first SNP, then the individual is a heterozygote. When an individual has an A/G genotype at SNP1, G/C genotype at SNP2, and A/C genotype at SNP3, there are four possible combinations of haplotypes (A, B, C, and D) for this individual. The set of SNP genotypes of this individual alone would not provide sufficient information to resolve which combination of haplotypes this individual possesses. However, when this individual's parents' genotypes are available, haplotypes could then be assigned unambiguously. For example, if one parent had an A/A genotype at SNP1, a G/C genotype at SNP2, and an A/A genotype at SNP3, and the other parent had an A/G genotype at SNP1, C/C genotype at SNP2, and C/C genotype at SNP3, while the child was a heterozygote at all three SNPs, there is only one possible haplotype combination, assuming there was no crossing over in this region during meiosis.

[0238] When the genotype information of relatives is not available, haplotype assignment can be done using the long range-PCR method (Clark, 1990, Molec. Biol. Evol. 7: 111-22; Clark et al., 1998, Am J Hum Genet 63: 595-612; Fullerton et al., 2000, Am J. Hum. Genet 67: 881-900; Templeton et al., 2000, Am J Hum Genet 66: 69-83). When the genotyping result of the SNPs of interest are available from general population samples, the most likely haplotypes can also be assigned using statistical methods (Excoffier & Slatkin, 1995, Mol Biol Evol 12: 921-7; Fallin & Schork, 2000, Am J Hum Genet 67: 947-59; Long et al., 1995, Am J Hum Genet 56: 799-810; Scheet, P., & Stephens, M. American Journal of Human Genetics, 78 (4), 629-644 (2006); Stephens, M., & Donnelly, P. American Journal of Human Genetics, 73 (5), 1162-1169 (2003); Zhang, S., Pakstis, A. J., Kidd, K. K., Zhao, H., Stephens, M., Smith, N. J., et al. American Journal of Human Genetics, 69(4), 906-914 (2001)).

[0239] Once an individual's haplotype in a certain chromosome region (i.e., locus) has been determined, it can be used as a tool for genetic association studies using different methods, which include, for example, haplotype relative risk analysis (Knapp et al., 1993, Am J Hum Genet 52: 1085-93; Li et al., 1998, Schizophr Res 32: 87-92; Matise, 1995, Genet Epidemiol 12: 641-5; Ott, J., 1989, Genet Epidemiol 6: 127-30; Terwilliger & Ott, 1992, Hum Hered 42: 337-46). Haplotype based genetic analysis, using a combination of SNPs, provides increased detection sensitivity, and hence statistical significance, for genetic associations of diseases, as compared to analyses using individual SNPs as markers. Multiple SNPs present in a single gene or a continuous chromosomal region are useful for such haplotype-based analyses.

### Uses of the Polynucleotides

[0240] Each of the polynucleotides identified herein can be used in numerous ways as reagents utilizing known techniques.

[0241] Increased or decreased expression of the gene in affected organisms as compared to unaffected organisms can be assessed using polynucleotides of the invention. Any of these alterations, including altered expression, or the presence of at least one SNP of the invention within the gene, can be used as a diagnostic or prognostic marker.

[0242] The method(s) provided herein can preferably be applied in a diagnostic method and/or kits in which polynucleotides and/or polypeptides are attached to a solid support. In one exemplary method, the support may be a “gene chip” or a “biological chip” as described in U.S. Pat. Nos. 5,837,832, 5,874,219, and 5,856,174. Further, such a gene chip with polynucleotides of the invention attached can be used to identify polymorphisms between the polynucleotide sequences, with polynucleotides isolated from a test subject. The knowledge of such polymorphisms (i.e. their location, as well as, their existence) would be beneficial in identifying disease loci for many disorders, including proliferative diseases and conditions. Such a method is described in U.S. Pat. Nos. 5,858,659 and 5,856,104. The U.S. patents referenced supra are hereby incorporated by reference in their entirety herein.

[0243] The invention encompasses polynucleotides of the invention that are chemically synthesized or reproduced as peptide nucleic acids (PNA), or according to other methods known in the art. The use of PNAs would serve as the preferred form if the polynucleotides are incorporated onto a solid support, or gene chip. For the purposes of the invention, a peptide nucleic acid (PNA) is a polyamide type of DNA analog and the monomeric units for adenine, guanine, thymine and cytosine are available commercially (e.g., Perceptive Biosystems). Certain components of DNA, such as phosphorus, phosphorus oxides, or deoxyribose derivatives, are not present in PNAs (as disclosed by Nielsen et al., 1991, Science 254: 1497 and Egholm et al., 1993, Nature 365: 666). PNAs bind specifically and tightly to complementary DNA strands and are not degraded by nucleases. In fact, PNA binds more strongly to DNA than DNA itself does. Smaller probes can be used than with DNA due to the stronger binding characteristics of PNA: DNA hybrids. In addition, it is more likely that single base mismatches can be determined with PNA/DNA hybridization because a single mismatch in a PNA/DNA 15-mer lowers the melting point (Tₘ) by 8°-20° C., vs. 4°-16° C. for the DNA/DNA 15-mer duplex. Also, the absence of charge groups in PNA means that hybridization can be done at low ionic strengths and reduce possible interference by salt during the analysis.

[0244] Such methods of using duplex oligonucleotides are known in the art and are encompassed by the invention (see EP1007712, which is hereby incorporated by reference herein in its entirety).

### EXAMPLES

### Example 1

### Methods of Genotyping the SNPs of the Invention

[0245] Genomic DNA samples from patients enrolled in Bristol Myers Squibb Company clinical trials (designated as “Trial A” and “Trial B”) for the DPP-IV inhibitor, Saxagliptin, were genotyped for SNPs in the human TEKT5, GRINL1A, HSD11B1 and CHST10 genes and evaluated relative to each patients response.

[0246] Genotyping was performed using Affymetrix gene chips (Affymetrix Inc., Mountain View, Calif.) or the TaqMan® method (Applied Biosystems, Foster City, Calif.) according to the manufacturers' protocols.

TABLE II

| | Forward | Reverse | | |
|---|---|---|---|---|
| SNP | Taqman® Primer | Taqman® Primer | Reference Probe | Variant Probe |
| TEKT5 | AGGCTGCCAGCT | TGCAGTGGGA | CCAGCACTGGAGC | CCAGCACCGGAG |
| | CCACTTC | AATGCTTTTG | CTGCAGC | CCTGCA |
| | (SEQ ID NO: 65) | (SEQ ID NO: 66) | (SEQ ID NO: 67) | (SEQ ID NO: 68) |
| GRINL1A | TCTGGGCACACTCC | ACTCAGGACCCA | CCGAGTGCGCCATC | CCGAGTGCGCCATC |
| (rs11853270) | CAGCT | AACCCAGG | TCTTTCTTCA | TCCTTCTTC |
| | (SEQ ID NO: 13) | (SEQ ID NO: 14) | (SEQ ID NO: 15) | (SEQ ID NO: 16) |
| GRINL1A | CAGGTCCCATGGAT | CACAGAAGCCA | CCCCACATATGAAT | CCCCACATACGAAT |
| (rs4774281) | TGCTCT | GCCACAGAG | TACAAAGGAAACCAA | TACAAAGGAAACCA |
| | (SEQ ID NO: 76) | (SEQ ID NO: 77) | (SEQ ID NO: 78) | (SEQ ID NO: 79) |
| GRINL1A | CACTTTGGGAGGCC | ATGACCACCTGGTT | TCTTGAACCCCTGGC | GTCTTGAACTCCTG |
| (rs8037000) | GAGTT | AATTTTTGTATTT | CT-MGBNFQ | GCCT-MGBNFQ |
| | (SEQ ID NO: 80) | (SEQ ID NO: 81) | (SEQ ID NO: 82) | (SEQ ID NO: 83) |
| GRINL1A | CAGAGGTTGCATTG | TATTATACAGGCTTC | CAAATCTCTCTCTCT | CAAATCTCTCTTTC |
| (rs6493943) | AGCTGAGAT | TGACACCTCCATA | TGCCCA-MGBNFQ | TTGCCCA-MGBNFQ |
| | (SEQ ID NO: 84) | (SEQ ID NO: 85) | (SEQ ID NO: 86) | (SEQ ID NO: 87) |
| GRINL1A | CATAGGGAGTGGG | GTGCTCCTTCTT | CTGCTGATTGCTGGT | TGCTGATTGCTCGT |
| (rs4774282) | CACTGCT | GGTGGCTG | TGAGTCTCACC | TGAGTCTCACC |
| | (SEQ ID NO: 88) | (SEQ ID NO: 89) | (SEQ ID NO: 90) | (SEQ ID NO: 91) |
| GRINL1A | TCCTACCCTTGCAG | TGGAGGAGGAA | TTCTCCACCTATCTC | TTCTCCACCTGTCT |
| (SNP2) | GACTTTTCT | AAGAAGCCAT | CCT-MGBNFQ | CCCT-MGBNFQ |
| | (SEQ ID NO: 92) | (SEQ ID NO: 93) | (SEQ ID NO: 94) | (SEQ ID NO: 95) |
| GRINL1A | ACAATTCATACAAG | AAAGACAGATA | CTCCCCCGACACAC | CCTCCCCTGACACA |
| (SNP12) | CATCTGTAAACCA | GGCCCCCCA | A-mgbnfq | CA-mgbnfq |
| | (SEQ ID NO: 96) | (SEQ ID NO: 97) | (SEQ ID NO: 98) | (SEQ ID NO: 99) |
| HSD11B1 | GCCACAAAGAGA | TCAGAATGAATGG | CACATTCCTTGACCC | CACATTCCTTGACTCA |
| | AGCAAGGC | GATAATTATGGG | AGAATTTTACTTCCA | GAATTTTACTTCCAGG |
| | (SEQ ID NO: 17) | (SEQ ID NO: 18) | (SEQ ID NO: 19) | (SEQ ID NO:20) |
| CHST10 | CATCCCCTTCCTT | TGACAGCCCAG | ACGGCTCCTAACGC | ACGGCTCTTAACGC |
| (rs1370627) | AACACCTGA | AGGGA | (SEQ ID NO: 23) | (SEQ ID NO: 24) |
| | (SEQ ID NO: 21) | (SEQ ID NO: 22) | | |
| CHST10 | AGTCCAAGGTGG | CTCAGCCTCCA | CTGGCCTTAGCTG | CTGGCCTTAACTG |
| (rs6716367) | CAGAAAGC | TTCCTGGTC | TCTTTCCTGGG | TCTTTCCTGGGC |
| | (SEQ ID NO: 25) | (SEQ ID NO: 26) | (SEQ ID NO: 27) | (SEQ ID NO: 28) |
| CHST10 | GCATGGCCACAC | GACTCCGTCTCAAAG | CTCTGGTCTAGAA | CTGGTCTACAAGT |
| (rs7585898) | CCTTCTAG | AAAAAAATATATATG | GTC | CTAC |
| | (SEQ ID NO: 29) | (SEQ ID NO: 30) | (SEQ ID NO: 31) | (SEQ ID NO: 32) |
| CHST10 | AGTCCCTGTGGG | CTTGTCTGCCA | CGGGCCACCACAA | CGGGCCACCACA |
| (rs17024136) | ATGGTGCT | AGGGCCAGT | TTAACATCACG | GTTAACATCACG |
| | (SEQ ID NO: 33) | (SEQ ID NO: 34) | (SEQ ID NO: 35) | (SEQ ID NO: 36) |
| CHST10 | CCAGGATGGTAG | CAGGGGTTTCTACA | TGCCAAGACAGCA | TGCCAAGACAGA |
| (rs17024129) | CTGGCATT | CCTAAAACATG | AAAGAACCGC | AAAAGAACCGCA |
| | (SEQ ID NO: 37) | (SEQ ID NO: 38) | (SEQ ID NO: 39) | (SEQ ID NO: 40) |
| CHST10 | TGATGCTTCCTCC | GGAGCAGGGA | CCCCTGTTTATGG | CCCCTGTTTACGG |
| (rs7574684) | TGTAGGTTCC | ACCTCAAACC | TGCTGTTTCCCC | TGCTGTTTCCC |
| | (SEQ ID NO: 41) | (SEQ ID NO: 42) | (SEQ ID NO: 43) | (SEQ ID NO: 44) |

**The allelic nucleotide in each probe sequence is shown in bold and underlined.

[0247] The probe sequences for each polymorphism disclosed herein were selected to provide optimal melting temperature criteria. Occasionally, a probe directed to the antisense strand was selected because the melting temperature of the antisense probe was more beneficial for the assay conditions used. Nonetheless, the present invention contemplates probe sequences directed to the opposite strand of each allele for each polymorphism. Aside from the probe sequences disclosed herein, one skilled in the art would be able to design appropriate sense and antisense probe sequences to detect which allele is present at the polymorphic locus for each polymorphism of the present invention.

### Example 2

### Statistical Analysis of the Association Between Saxagliptin Response and the SNPs of the Invention

[0248] The association between favorable DPP-IV inhibitor therapy response and the single nucleotide polymorphisms of the invention were investigated by applying statistical analysis to the results of the genotyping assays described herein. The analysis identified one or more of specific genomic factors in genomic DNA samples from index cases and control subjects who were exposed to DPP-IV inhibitor treatment in a clinical study.

[0249] There were two clinical trials, designated “Trial A” and Trial B″, in which the association between the TEKT5, GRINL1A, HSD11B1 and CHST10 SNPs and the response to saxagliptin alone or in combination with other oral antidiabetic therapy was evaluated. The association between the SNPs and the response to saxagliptin was evaluated in two ways. SNPs from the genome-wide SNP panel were tested for association with response to DPP-IV inhibitors by two analytical methodologies. In one method, SNPs were identified with significant differences in mean HBA1C response among individuals with different genotypes on treatment, taking into account covariates such as demographic differences with an analysis of covariance (ANCOVA) statistical model. SNPs with consistent in their effect on HBA1C in both trials were considered for further evaluation. In a second method, SNPs were examined for association with response cluster. SNPs consistently associated with response cluster in both trials were further evaluated for influence on fasting glycosylated hemoglobin or glucose levels using analysis of covariance.

Sample: Subjects in BMS clinical trials, (Trial A and Trial B) receiving DPP-IV inhibitor (saxigliptin) therapy. All subjects have diabetes and the study group was mixed with respect to age, race and duration of diabetes.
Measures: Single nucleotide polymorphisms (SNPs) in a genome-wide panel were genotyped on all subjects essentially as described in Example 1. SNPs in human TEKT5, GRINL1A, HSD11B1 and CHST10 were found to be consistently associated with HBA1C response as described above. The SNPs that were genotyped likely represent a sample of the polymorphic variation in each gene and are not exhaustive with regard to coverage of the total genetic variation that may be present in each gene. The SNP for which a statistical association to DPP-IV inhibitor-dependent metabolic abnormalities was confirmed is provided in Table III.
Statistical Analyses: Initial analysis to determine SNP association with cluster membership was performed using the genotypic test (2-degrees of freedom) implemented in the program PLINK (Purcell et al., 2007 Amer. Journ. Hum Genet. 81: 559-75. PLINK: a tool set for whole-genome association and population-based linkage analyses). SNPs that were associated with cluster membership in the same direction (i.e. the same allele was associated with super-response) at P<=0.001 in two independent trials of saxagliptin were selected for follow-up analysis. Follow-up analysis was performed employing a statistical package, SPSS v.14 (SPSS Inc. Chicago, Ill.). Some SNP associations were also discovered or confirmed using an ANCOVA modeling approach as described below. SNPs that were associated with differential genotype response were identified by a significant difference in HBA1C response (P<=0.05) in two independent trials. Analysis was performed employing a statistical package, SAS v. 8.2 (SAS Institute Inc., Cary, N.C.).
Clustering: Cluster analysis was employed to identify homogeneous sub-groups that exhibited markedly different efficacy responses to saxagliptin therapy. Baseline glycosylated hemoglobin (HbA1c) and change in HbA1c after twelve weeks (study A) or twenty-four weeks (study B) of DPP-IV inhibitor therapy for each individual were used in this analysis. Individuals with similar responses to saxagliptin therapy, as measured by HbA1c levels, were grouped together. This process was iteratively repeated until all individuals were clustered into groups, either non-responders (poor response to saxagliptin therapy) or super responders (response to saxagliptin therapy). The two-step clustering routine implemented in SPSS version 12 (Chicago, Ill., US) was used. Differences in means between clusters for HbA1c were evaluated using Kruskal-Wallis test.

[0250] ANCOVA: An analysis of covariance (ANCOVA) was employed to identify SNPs with genotypes exhibiting different efficacy responses to saxagliptin therapy in two different trials. Baseline glycosylated hemoglobin (HbA1c) and change in HbA1C after twelve or twenty-four weeks (trial-dependent) of DPP-IV inhibitor (saxagliptin) therapy for each individual were used in this analysis. The ANCOVA model provides an estimate of mean final HbA1C after treatment for different genotypes, taking into account clinical and demographic information. The general form of this model is given by the equation:

Final HbA1c=β₀+β₁ baselineHbA1c+β₂ baselinePlasmaGlucose+β₃ Drug(0/1)+β₄ Genotype+P5 Genotype*Drug,

where the model coefficients were estimated for each SNP and study population, and additional covariates may be included for different study populations. This may be used as an estimate of the expected final HbA1C for an individual of a particular genotype receiving DPP-IV inhibitor after 12 to 24 weeks on treatment.

[0251] The response to saxagliptin therapy for each SNP was modeled by taking into account baseline HbA1C and other baseline covariates, such as demographic variables. The SNP genotype was included in the model and the difference in HbA1c was estimated between wildtype homozygous and heterozygous or rare homozygous individuals. SNPs that were associated with differential genotype response were identified by a significant (P<=0.05) difference (in the same direction) in HBA1C response between genotypes in two independent trials. Analysis was performed using contrast estimates with the GLM procedure in SAS v. 8.2 (SAS Institute Inc., Cary, N.C.).

[0252] The genotypes of the individuals in both groups (non-responders and super responders) were determined with respect to the polymorphic loci located at nucleotide position 26,472 of SEQ ID NO: 63 or 64 (TEKT5), nucleotide position 87,992 of SEQ ID NO: 1 or 2 (GRINL1A), nucleotide position 34,403 of SEQ ID NO: 3 or 4 (HSD11B1), nucleotide position 24,707 of SEQ ID NO: 5 or 6, nucleotide position 34,078 of SEQ ID NO: 5 or 7, nucleotide position 35,799 of SEQ ID NO: 5 or 8, nucleotide position 38,709 of SEQ ID NO: 5 or 9, nucleotide position 38,947 of SEQ ID NO: 5 or 10, and nucleotide position 41,180 of SEQ ID NO: 5 or 11 (CHST10). Specifically, for each individual in both groups, it was determined whether the individual had a reference allele or a variant allele at each SNP of the three gene sequences, for example, a reference (“T”) allele or a variant (“C”) allele at position 26,472 of SEQ ID NO: 63 or 642; a reference (“T”) allele or a variant (“C”) allele at position 87,992 of SEQ ID NO: 1 or 2; a reference (“C”) allele or a variant (“T”) allele at position 34,403 of SEQ ID NO: 3 or 4; a reference (“G”) allele or a variant (“A”) allele at position 24,707 of SEQ ID NO: 5 or 6; a reference (“C”) allele or a variant (“T”) allele at position 34,078 of SEQ ID NO: 5 or 7; a reference (“G”) allele or a variant (“C”) allele at position 35,799 of SEQ ID NO: 5 or 8; a reference (“A”) allele or a variant (“G”) allele at position 38,709 of SEQ ID NO: 5 or 9; a reference (“C”) allele or a variant (“A”) allele at position 38,947 of SEQ ID NO: 5 or 10; and a reference (“T”) allele or a variant (“C”) allele at position 41,180 of SEQ ID NO: 5 or 11. Genetic association between the SNPs and the non-responder and super responder clusters was assessed using Fisher's exact test.

[0253] Table III shows the results of the frequency of the variant allele in each of the three SNPs found in the non-responder and super responder cluster group populations.

[0254] Results: Two distinct subgroups of patients were observed in this trial as shown in Table 3 (the first and second rows for each SNP represent studies A and B, respectively), where the allelic frequency of the variant allele for GRINL1A, HSD11B1 and CHST10 genes is higher in the non-responder group than in the super-responder group. That is, a higher percentage of individuals in the non-responder group have the variant allele for each of the three genes than the percentage of individuals in the super-responder group. P-values for the allelic association test (1 degree of freedom) are provided for each SNP in studies A and B. These results indicate that the variant allele for GRINL1A, HSD11B1 and CHST10 is associated with a decreased likelihood of having a favorable response to the administration of a therapeutically-effective amount of a DPP-IV inhibitor or a DPP-IV inhibitor in combination with other oral antidiabetic therapy. The results from the ANCOVA approach indicate that for TEKT5, the wild-type homozygous individuals differ significantly from heterozygous in HBA1C response to administration of a therapeutically-effective amount of a DPP-IV inhibitor or a DPP-IV inhibitor in combination with other oral antidiabetic therapy.

TABLE III

| | | Allele Frequency | | |
|---|---|---|---|---|
| Gene | SNP | Non-responders | Superresponders | P value |
| GRINL1A | rs11853270 | 0.39 | 0.11 | 0.0004 |
| | | 0.35 | 0.13 | 0.001 |
| HSD11B1 | rs17015076 | 0.25 | 0.04 | 0.0002 |
| | | 0.25 | 0.05 | 0.001 |
| CHST10 | rs1370627 | 0.17 | 0.03 | 0.0008 |
| | | 0.20 | 0.02 | 0.001 |

[0255] FIGS. 1-8 show the results of SNP association with saxagliptin response when the number of super-responder and non-responder individuals having the various genotypes was determined: (1) homozygous for reference allele at position 87,992 of SEQ ID NO: 1 or 2 (T/T); (2) heterozygous for allele at position 87,992 of SEQ ID NO: 1 or 2 (T/C); (3) homozygous for variant allele at position 87,992 of SEQ ID NO: 1 or 2 (C/C); (4) homozygous for reference allele at position 34,403 of SEQ ID NO: 3 or 4 (C/C); (5) heterozygous for allele at position 34,403 of SEQ ID NO: 3 or 4 (C/T); (6) homozygous for variant allele at position 34,403 of SEQ ID NO: 3 or 4 (T/T); (7) homozygous for reference allele at position 24,707 of SEQ ID NO: 5 or 6 (G/G); (8) heterozygous for allele at position 24,707 of SEQ ID NO: 5 or 6 (G/A); (9) homozygous for variant allele at position 24,707 of SEQ ID NO: 5 or 6 (A/A); (10) homozygous for reference allele at position 34,078 of SEQ ID NO: 5 or 7 (C/C); (11) heterozygous for allele at position 34,078 of SEQ ID NO: 5 or 7 (C/T); (12) homozygous for variant allele at position 34,078 of SEQ ID NO: 5 or 7 (T/T); (13) homozygous for reference allele at position 35,799 of SEQ ID NO: 5 or 8 (G/G); (14) heterozygous for allele at position 35,799 of SEQ ID NO: 5 or 8 (G/C); (15) homozygous for variant allele at position 35,799 of SEQ ID NO: 5 or 8 (C/C); (16) homozygous for reference allele at position 38,709 of SEQ ID NO: 5 or 9 (A/A); (17) heterozygous for allele at position 38,709 of SEQ ID NO: 5 or 9 (A/G); (18) homozygous for variant allele at position 38,709 of SEQ ID NO: 5 or 9 (G/G); (19) homozygous for reference allele at position 38,947 of SEQ ID NO: 5 or 10 (C/C); (20) heterozygous for allele at position 38,947 of SEQ ID NO: 5 or 10 (C/A); (21) homozygous for variant allele at position 38,947 of SEQ ID NO: 5 or 10 (A/A); (22) homozygous for reference allele at position 41,180 of SEQ ID NO: 5 or 11 (T/T); (23) heterozygous for allele at position 41,180 of SEQ ID NO: 5 or 11 (T/C); (24) homozygous for variant allele at position 41,180 of SEQ ID NO: 5 or 11 (C/C); (25) homozygous for reference allele at position 26,472 of SEQ ID NO: 63 or 64 (T/T); (26) heterozygous for allele at position 26,472 of SEQ ID NO: 63 or 64 (T/C); (27) homozygous for variant allele at position 26,472 of SEQ ID NO: 63 or 64 (C/C); (28) (1) homozygous for reference allele at position 87,992 of SEQ ID NO: 1 or 2 (T/T); (29) heterozygous for allele at position 87,992 of SEQ ID NO: 1 or 2 (T/C); (30) homozygous for variant allele at position 87,992 of SEQ ID NO: 1 or 2 (C/C).

[0256] FIG. 1 depicts the saxagliptin response results for the GRINL1A SNP found at position 87,992 of SEQ ID NO: 1 or 2. As shown, a high percentage of individuals in the super responder group are homozygous for the reference allele (T/T) whereas a much lower percentage of individuals in the super responder group are heterozygous (T/C) and none of the individuals in the super responder group are homozygous for the variant allele (C/C). These results show a strong association between the reference allele and a favorable saxagliptin response.

[0257] FIG. 2 depicts the saxagliptin response results for the HSD11B1 SNP found at position 34,403 of SEQ ID NO: 3 or 4. As shown, a high percentage of individuals in the super responder group are homozygous for the reference allele (C/C), whereas a much lower percentage of individuals in the super responder group are heterozygous (C/T) and an even lower percentage of the individuals in the super responder group are homozygous for the variant allele (T/T). These results show a strong association between the reference allele and a favorable saxagliptin response.

[0258] FIG. 3 depicts the saxagliptin response results for the CHST10 SNP found at position 24,707 of SEQ ID NO: 5 or 6. As shown, a high percentage of individuals in the super responder group are homozygous for the reference allele (G/G), whereas a much lower percentage of individuals in the super responder group are heterozygous (G/A) and none of the individuals in the super responder group are homozygous for the variant allele (A/A). These results show a strong association between the reference allele and a favorable saxagliptin response.

[0259] FIG. 4 depicts the saxagliptin response results for the CHST10 SNP found at position 34,078 of SEQ ID NO: 5 or 7. As shown, a high percentage of individuals in the super responder group are homozygous for the reference allele (C/C), whereas a much lower percentage of individuals in the super responder group are heterozygous (C/T) and none of the individuals in the super responder group are homozygous for the variant allele (T/T). These results show a strong association between the reference allele and a favorable saxagliptin response.

[0260] FIG. 5 depicts the saxagliptin response results for the CHST10 SNP found at position 35,799 of SEQ ID NO: 5 or 8. As shown, a high percentage of individuals in the super responder group are homozygous for the reference allele (G/G), whereas a much lower percentage of individuals in the super responder group are heterozygous (G/C) and none of the individuals in the super responder group are homozygous for the variant allele (C/C). These results show a strong association between the reference allele and a favorable saxagliptin response.

[0261] FIG. 6 depicts the saxagliptin response results for the CHST10 SNP found at position 38,709 of SEQ ID NO: 5 or 9. As shown, a high percentage of individuals in the super responder group are homozygous for the reference allele (A/A), whereas a much lower percentage of individuals in the super responder group are heterozygous (A/G) and none of the individuals in the super responder group are homozygous for the variant allele (G/G). These results show a strong association between the reference allele and a favorable saxagliptin response. FIG. 7 depicts the saxagliptin response results for the CHST10 SNP found at position 38,947 of SEQ ID NO: 5 or 10. As shown, a high percentage of individuals in the super responder group are homozygous for the reference allele (C/C), whereas a much lower percentage of individuals in the super responder group are heterozygous (C/A) and none of the individuals in the super responder group are homozygous for the variant allele (A/A). These results show a strong association between the reference allele and a favorable saxagliptin response.

[0262] FIG. 8 depicts the saxagliptin response results for the CHST10 SNP found at position 41,180 of SEQ ID NO: 5 or 11. These results show a strong association between the reference allele and a favorable saxagliptin response.

[0263] FIG. 10 shows a statistical association between human GRINL1A SNP (nucleotide position 87,992 of SEQ ID NOs: 1 and 2) alleles “T” (WT, reference) and “C” (SNP carriers, variant) with a likelihood of a favorable response to the administration of a therapeutically-effective amount of a DPP-IV inhibitor. The response to DPP-IV inhibitor is assessed by measuring fasting blood glucose levels in blood. Results are shown in terms of mean change in fasting glucose levels for each genotype patient. As shown, reference carriers have a higher reduction in mean fasting glucose levels than SNP carriers in response to saxagliptin treatment.

[0264] FIG. 19 depicts the saxagliptin response results for the TEKT5 SNP found at position 26,472 of SEQ ID NO: 63 or 64. The homozygous reference allele (T/T) individuals have lower mean HbA1C in response to therapy than heterozygous individuals. The difference in mean HbA1C response between T/T and T/C individuals on therapy was found to be statistically significant in both trials. These results show a strong association between individuals being homozygous for the reference allele and having a favorable saxagliptin response. Thus, individuals having the reference allele at the described SNP in the TEKT5 gene are more likely to have a favorable response to the administration of a therapeutically-effective amount of a DPP-IV inhibitor or a DPP-IV inhibitor in combination with other oral antidiabetic therapy. The ANCOVA model also provides an estimate of the mean final HbA1C for different genotypes, and may be used as an estimate of the expected final HbA1C for an individual of a particular TEKT5 genotype receiving DPP-IV inhibitor.

[0265] FIG. 20 depicts the saxagliptin/metformin response results for the GRINL1A SNP found at position 87,992 of SEQ ID NO: 1 or 2. The homozygous reference allele (T/T) individuals have greater mean HbA1C glyburide-corrected change from baseline in response to therapy than heterozygous individuals. These results show a strong association between the reference allele and a favorable saxagliptin/metformin response.

[0266] FIG. 21 depicts the saxagliptin/glyburide response results for the GRINL1A SNP found at position 87,992 of SEQ ID NO: 1 or 2. The homozygous reference allele (T/T) individuals have greater mean HbA1C metformin-corrected change from baseline in response to therapy than heterozygous individuals. These results show a strong association between the reference allele and a favorable saxagliptin/metformin response.

[0267] These results demonstrate that polymorphisms in the TEKT5, GRINL1A, HSD11B1 and CHST10 genes contribute to differences in the favorability of response to saxagliptin therapy independent of other significant predictors such as age and duration of diabetes.

[0268] Further saxagliptin studies performed with individuals having either the homozygous reference allele (T/T) as compared with those carrying the variant allele (C/T or C/C) at position 87,992 of SEQ ID NO: 1 or 2 showed that differences in genotype produced significant differences in the response to saxagliptin administration as measured by the mean change in HbA1c levels following saxagliptin treatment. The results of these studies are shown in FIG. 11. Specifically, the variant SNP carriers experienced little change in HbA1c levels following saxagliptin treatment as compared with individuals homozygous for the reference allele. In contrast, those subjects homozygous for the reference allele experienced a significant reduction in mean HbA1c levels following saxagliptin treatment. These results indicate that individuals with the GRINL1A reference allele show an increased therapeutic response to saxagliptin treatment compared with individuals having the GRINL1A variant allele. The significance of the differences between means of reference allele homozygotes and variant allele carriers was determined using analysis of covariance.

[0269] Other studies performed with individuals having the homozygous reference allele (T/T) as compared with those carrying the variant allele (C/T or C/C) at position 87,992 of SEQ ID NO: 1 (GRINL1A gene) showed similar results. FIG. 12 shows that differences in genotype produced significant differences in the response to saxagliptin administration as measured by the mean change in fasting glucose levels following saxagliptin treatment. Specifically, the variant SNP carriers experienced little change in the fasting glucose levels following saxagliptin treatment as compared with matched placebo controls. In contrast, those subjects homozygous for the reference allele experienced a significant reduction in the mean fasting glucose levels following saxagliptin treatment as compared to carriers of the variant allele (C/T and C/C). These results indicate that individuals homozygous for the GRINL1A reference allele show an increased therapeutic response to saxagliptin treatment compared with individuals having the GRINL1A variant allele.

[0270] Similarly, FIG. 13 shows that differences in genotype produced significant differences in the response to saxagliptin administration as measured by the mean change in AUC glucose levels following saxagliptin treatment. Specifically, the variant SNP carriers experienced little change in the AUC glucose levels following saxagliptin treatment as compared with those homozygous for the reference allele. In contrast, those homozygous for the reference allele experienced a significant reduction in the AUC glucose levels following saxagliptin treatment. These results indicate that individuals with the GRINL1A reference genotype show an increased therapeutic response to saxagliptin treatment compared with individuals having the GRINL1A variant.

[0271] The results discussed above were further confirmed by measuring DPP-IV activity in the two GRINL1A allelic subgroups in the presence or absence of DPP-IV inhibitor. The DPP-IV activity experiments showed no significant difference in plasma DPP-IV activity between the subpopulation having the homozygous reference allele and the sub-population carrying the variant allele, suggesting that variant allele carriers do not respond to saxagliptin treatment despite inhibition in DPP-IV activity. Differences in within-group group means were significant. All pairwise between-group differences in means were significant. Other pairwise comparisons were significant.

[0272] Similarly, further saxagliptin studies performed with individuals having the homozygous reference allele as compared with those carrying the variant at position 34,403 of SEQ ID NO: 3 or 4 (HSD11B1 gene) showed that differences in genotype produced significant differences in the response to saxagliptin administration as measured by the mean change in HbA1c levels following saxagliptin treatment. The results of these studies are shown in FIG. 14. Specifically, the variant SNP carriers experienced little change in HbA1c levels following saxagliptin treatment as compared those subjects homozygous for the reference allele. In contrast, the reference allele homozygotes experienced a greaterreduction in mean HbA1c levels following saxagliptin treatment as compared to carriers of the variant allele. These results indicate that individuals with the HSD11B1 reference allele show an increased therapeutic response to saxagliptin treatment compared with individuals having the HSD11B1 variant allele.

[0273] Similarly, further saxagliptin studies were performed with individuals having either the homozygous reference allele or the homozygous variant allele of the CHST10 gene. Specifically, saxagliptin studies performed in Trial A and Trial B with individuals the homozygous reference allele as compared with those carrying the variant allele at position 24,707 of SEQ ID NO: 5 or 6, position 34,078 of SEQ ID NO: 5 or 7, position 35,799 of SEQ ID NO: 5 or 8, position 38,709 of SEQ ID NO: 5 or 9, position 38,947 of SEQ ID NO: 5 or 10, or position 41,180 of SEQ ID NO: 5 or 11 (HSD11B1 gene) showed that differences in genotype produced differences in the response to saxagliptin administration as measured by the mean change in HbA1c levels following saxagliptin treatment. The results of these studies are shown in FIG. 15-20, respectively. The variant SNP carriers experienced little change in HbA1c levels following saxagliptin treatment as compared with the reference allele homozygotes. These results indicate that individuals with the CHST10 reference allele show an increased therapeutic response to saxagliptin treatment compared with individuals having the CHST10 variant allele.

### Example 3

### Methods of Isolating the Native Forms of the Genes of the Invention (Human TEKT5, GRINL1A, HSD11B1, and CHST10)

[0274] A number of methods have been described in the art that can be utilized in isolating the native forms of the human TEKT5, GRINL1A, HSD11B1, and CHST10 genes. Rather than describe known methods here, several specific methods are referenced below and are hereby incorporated by reference herein in their entireties. The artisan, skilled in the molecular biology arts, would be able to isolate the native form of human TEKT5, GRINL1A, HSD11B1, and CHST10 genes based upon the methods and information contained, and/or referenced, therein.

[0275] For example, BAC clone RP11-100A21 is believed to contain the entire genomic sequence of GRINL1A; BAC clone RP11-117D13 is believed to contain the entire genomic sequence of HSD11B1, and BAC clone RP11-292K15 is known to contain the entire genomic sequence of CHST10, and BAC clone RP11-916G12 is known to contain the entire genomic sequence of TEKT5.

[0276] Additional methods for isolating the human TEKT5, GRINL1A, HSD11B1, and CHST10 genes can also be found in the references cited in the Genbank accession numbers for each gene provided herein that are publicly available and are also hereby incorporated by reference herein.

[0277] For example, additional methods for isolating the human GRINL1A gene can be found in the Genbank database under the accession number gi|NC_{—}000015.8, including but not limited to, Roginski et al., Genomics 84 (2), 265-276 (2004).

[0278] Additional methods for isolating the human HSD11B1 gene can be found in the Genbank data base under the accession number gi|NC_{—}000001.9, including but not limited to, Tannin et al., J. Biol. Chem. 266 (25), 16653-16658 (1991).

[0279] Additional methods for isolating the human CHST10 gene can be found in the Genbank data base under the accession number gi|NC_{—}000002.10, including but not limited to, Ong et al., J. Biol. Chem. 273 (9), 5190-5195 (1998); Ong et al., J. Biol. Chem. 274 (36), 25608-25612 (1999); and/or Kang et al., J. Biol. Chem. 277 (38), 34766-34772 (2002).

### Example 4

### Methods of Isolating Polymorphic Forms of the Genes of the Invention (Human TEKT5, GRINL1A, HSD11B1, and CHST10)

[0280] Since the allelic genes of the invention represent genes present within at least a subset of the human population, these genes can be isolated using the methods provided in Example 3 above. For example, the source DNA used to isolate the allelic gene can be obtained through a random sampling of the human population and repeated until the allelic form of the gene is obtained. Preferably, samples of source DNA from the human population are screened using the SNPs and methods of the invention to identify those sources that comprise the allelic form of the gene. Once identified, such a source can be used to isolate the allelic form of the gene(s). The invention encompasses the isolation of such allelic genes from both genomic and/or cDNA libraries created from such source(s).

[0281] In reference to the specific methods provided in Example 3 above, it is expected that isolating the polymorphic alleles of the human TEKT5, GRINL1A, HSD11B1, and CHST10 genes would be within the skill of an artisan trained in the molecular biology arts. Nonetheless, a detailed exemplary method for isolating the polymorphic alleles of the human TEKT5, GRINL1A, HSD11B1, and CHST10 genes is provided. As an example, methods for isolating the variant allele (“C”) at nucleotide position 87,992 of SEQ ID NO: 2 are provided. One skilled in the art would know how to adapt the methods described here to isolate other polymorphic alleles, including the variant allele (“C”) at nucleotide position 26,472 of SEQ ID NO: 64 (TEKT5 gene), the variant allele (“C”) at nucleotide position 87,992 of SEQ ID NO: 2, the variant allele (“G”) at nucleotide position 89,441 of SEQ ID NO: 69, the variant allele (“A”) at nucleotide position 89,662 of SEQ ID NO: 70, the variant allele (“A”) at nucleotide position 89,853 of SEQ ID NO: 71, the variant allele (“C”) at nucleotide position 94,074 of SEQ ID NO: 72, the variant allele (“G”) at nucleotide position 87,712 of SEQ ID NO: 73, and the variant allele (“A”) at nucleotide position 93,598 of SEQ ID NO: 74 (GRINL1A gene), the variant allele (“T”) at nucleotide position 34,403 of SEQ ID NO: 4 (HSD11B1 gene) and the variant allele (“A”) at nucleotide position 24,707 of SEQ ID NO: 6, the variant allele (“T”) at nucleotide position 34,078 of SEQ ID NO: 7, the variant allele (“C”) at nucleotide position 35,799 of SEQ ID NO: 8, the variant allele (“G”) at nucleotide position 38,709 of SEQ ID NO: 9, the variant allele (“A”) at nucleotide position 38,947 of SEQ ID NO: 10, and the variant allele (“C”) at nucleotide position 41,180 of SEQ ID NO: 11 (CHST10 gene).

[0282] First, the individuals with the “C” allele at the locus corresponding to nucleotide 87,992 of SEQ ID NO: 1 or 2 are identified by genotyping genomic DNA samples using the method outlined in Example 1 herein. Other methods of genotyping can be employed, such as the FP-SBE method (Chen et al., 1999, Genome Res. 9(5):492-498), or other methods described herein. DNA samples publicly available (e.g., from the Coriell Institute (Collingswood, N.J.) or from the clinical samples described herein can be used. Oligonucleotide primers that are used for this genotyping assay are provided in Example 1.

[0283] By analyzing genomic DNA samples, individuals with the variant allele of the GRINL1A SNP can be identified. Once identified, clones comprising the genomic sequence can be obtained using methods well known in the art (see Sambrook et al., 1989, Molecular Cloning: A Laboratory Manual, Cold Spring Harbor Laboratory Press, Cold Spring Harbor, N.Y.; and Current Protocols in Molecular Biology, 1995, Ausubel et al., eds, John Wiley and Sons, Inc., which are hereby incorporated by reference herein.).

[0284] If cDNA clones of the coding sequence of this allele of the gene are of interest, such clones can be obtained in accordance with the following steps. Lymphoblastoid cell lines can be obtained from the Coriell Institute. These cells can be grown in RPMI-1640 medium with L-glutamine plus 10% FCS at 37 degrees. PolyA+ RNA is then isolated from these cells using Oligotex Direct Kit (Life Technologies).

[0285] First strand cDNA (complementary DNA) is produced using Superscript Preamplification System for First Strand cDNA Synthesis (Life Technologies, Cat No 18089-011) using these polyA+ RNA as templates, as specified in the users manual which is hereby incorporated herein by reference in its entirety. Specific cDNA encoding the human GRINL1A protein is amplified by polymerase chain reaction (PCR) using a forward primer that hybridizes to the 5′-UTR region, a reverse primer that hybridizes to the 3′-UTR region, and these first strand cDNA as templates (Sambrook et al., 1989, Id.). Alternatively, these primers can be designed using Primer3 program (Rozen, 2000, pp. 365-386, Bioinformatics Methods and Protocols in Methods of Molecular Biology, S. Krawetz, S. Misener, Eds., Humana Press, Totowa, N.J.). Restriction enzyme sites (example: SalI for the forward primer, and NotI for reverse primer) are added to the 5′-end of these primer sequences to facilitate cloning into expression vectors after PCR amplification. PCR amplification can be performed essentially as described in the owner's manual of the Expand Long Template PCR System (Roche Molecular Biochemicals) following manufacturer's standard protocol, which is hereby incorporated herein by reference in its entirety.

[0286] PCR amplification products are digested with restriction enzymes (such as SalI and NotI, for example) and ligated with expression vector DNA cut with the same set of restriction enzymes. pSPORT (Invitrogen) is one example of such an expression vector. After ligated DNA is introduced into E. coli cells (Sambrook et al., 1989, Id.), plasmid DNA is isolated from these bacterial cells. This plasmid DNA is sequenced to confirm the presence of an intact (full-length) coding region of the human GRINL1A protein with the variation, if the variation results in changes in the encoded amino acid sequence, using methods well known in the art and described elsewhere herein.

[0287] The skilled artisan would appreciate that the above method can be applied to isolating other novel human GRINL1A genes through the simple substitution of applicable PCR and sequencing primers. Such primers can be selected from any one of the applicable primers provided in herein, or can be designed using the Primer3 program (Rozen S 2000) as described. Such primers can preferably comprise at least a portion of any one of the polynucleotide sequences of the invention.

### Example 5

### Method of Engineering the Allelic Forms of the Genes of the Invention (Human TEKT5, GRINL1A, HSD11B1, and CHST10)

[0288] Aside from isolating the allelic genes of the present invention from DNA samples obtained from the human population, as described in Example 4 above, the invention also encompasses methods of engineering the allelic genes of the present invention through the application of site-directed mutagenesis to the isolated native forms of the genes. Such methodology can be applied to synthesize allelic forms of the genes comprising at least one, or more, of the encoding SNPs of the present invention (e.g., silent, missense)—preferably at least 1, 2, 3, or 4 encoding SNPs for each gene.

[0289] In reference to the specific methods provided in Example 4 above, it is expected that isolating the novel polymorphic TEKT5, GRINL1A, HSD11B1, and CHST10 genes of the present invention would be within the ordinary skill of an artisan trained in the molecular biology arts. Nonetheless, a detailed exemplary method of engineering the polymorphic alleles to comprise the encoding and/or non-coding polymorphic nucleic acid sequence is provided. As an example, methods for engineering the variant allele (“C”) at nucleotide position 87,992 of SEQ ID NO: 2, is provided. One skilled in the art would know how to adapt the methods described here to engineer other alleles, including the variant allele (“C”) at nucleotide position 26,472 of SEQ ID NO: 64 (TEKT5 gene), the variant allele (“C”) at nucleotide position 87,992 of SEQ ID NO: 2 (GRINL1A gene), the variant allele (“G”) at nucleotide position 89,441 of SEQ ID NO: 69 (GRINL1A gene), the variant allele (“A”) at nucleotide position 89,662 of SEQ ID NO: 70 (GRINL1A gene), the variant allele (“A”) at nucleotide position 89,853 of SEQ ID NO: 71 (GRINL1A gene), the variant allele (“C”) at nucleotide position 94,074 of SEQ ID NO: 72 (GRINL1A gene), the variant allele (“G”) at nucleotide position 87,712 of SEQ ID NO: 73 (GRINL1A gene), and the variant allele (“A”) at nucleotide position 93,598 of SEQ ID NO: 74 (GRINL1A gene), the variant allele (“T”) at nucleotide position 34,403 of SEQ ID NO: 4 (HSD11B1 gene), the variant allele (“A”) at nucleotide position 24,707 of SEQ ID NO:6 (CHST10 gene), the variant allele (“T”) at nucleotide position 34,078 of SEQ ID NO:7 (CHST10 gene), the variant allele (“C”) at nucleotide position 35,799 of SEQ ID NO:8 (CHST10 gene), the variant allele (“G”) at nucleotide position 38,709 of SEQ ID NO:9 (CHST10 gene), the variant allele (“A”) at nucleotide position 38,947 of SEQ ID NO:10 (CHST10 gene), and the variant allele (“C”) at nucleotide position 41,180 of SEQ ID NO:11 (CHST10 gene).

[0290] Briefly, genomic clones containing the human GRINL1A gene can be identified by homology searches with the BLASTN program (Altschul, S F et al., 1990, J. Mol. Biol. 215: 403-410) against the Genbank non-redundant nucleotide sequence database using the published human GRINL cDNA sequence (GenBank Accession No.: gi|NC_{—}000015.8), for example, BAC RP11-100A21. Alternatively, the genomic sequence of the human GRINL1A gene can be obtained as described herein. After obtaining these clones, they are sequenced to confirm the validity of the DNA sequences.

[0291] Similarly, genomic clones containing the human TEKT5 gene can be identified by homology searches with the BLASTN program (Altschul, S F et al., 1990, J. Mol. Biol. 215: 403-410) against the Genbank non-redundant nucleotide sequence database using the published human TEKT5 cDNA sequence (GenBank Accession No.: gi|NM_{—}144674.1), for example, BAC RP11-916G12. Alternatively, the genomic sequence of the human TEKT5 gene can be obtained as described herein. After obtaining these clones, they are sequenced to confirm the validity of the DNA sequences.

[0292] Similarly, genomic clones containing the human HSD11B1 gene can be identified by homology searches with the BLASTN program (Altschul, S F et al., 1990, J. Mol. Biol. 215: 403-410) against the Genbank non-redundant nucleotide sequence database using the published human HSD11B1 cDNA sequence (GenBank Accession No.: gi|NC_{—}000001.9), for example, BAC RP11-117D13. Alternatively, the genomic sequence of the human HSD11B1 gene can be obtained as described herein. After obtaining these clones, they are sequenced to confirm the validity of the DNA sequences.

[0293] Similarly, genomic clones containing the human CHST10 gene can be identified by homology searches with the BLASTN program (Altschul, S F et al., 1990, J. Mol. Biol. 215: 403-410) against the Genbank non-redundant nucleotide sequence database using the published human CHST10 cDNA sequence (GenBank Accession No.: gi|NC_{—}000002.10), for example, BAC RP11-292K15. Alternatively, the genomic sequence of the human CHST10 gene can be obtained as described herein. After obtaining these clones, they are sequenced to confirm the validity of the DNA sequences.

[0294] However, in the case of the variant alleles, genomic clones would need to be obtained and can be identified by homology searches with the BLASTN program (Altschul S F, 1990, Id.) against the Genbank non-redundant nucleotide sequence database using the published human GRINL1A genomic sequence (GenBank Accession No.: NC_{—}000015.8), using the published human TEKT5 genomic sequence (GenBank Accession No.: NM_{—}144674), using the published human GRINL1A genomic sequence (GenBank Accession No.: NM_{—}001018090), using the published human HSD11B1 genomic sequence (GenBank Accession No.: NC_{—}000001.9), or using the published human CHST10 genomic sequence (GenBank Accession No.: NC_{—}000002.10). Alternatively, the genomic sequence of the human HSD11B1, or CHST10 gene can be obtained as described herein. After obtaining these clones, they are sequenced to confirm the validity of the DNA sequences.

[0295] Once these clones are confirmed to contain the intact wild type cDNA or genomic sequence of the human TEKT5, GRINL1A, HSD11B1, or CHST10 coding and/or non-coding region, the variant polymorphism (mutation) can be introduced into the native sequence using PCR directed in vitro mutagenesis (Cormack, B., Directed Mutagenesis Using the Polymerase Chain Reaction. Current Protocols in Molecular Biology, John Wiley & Sons, Inc. Supplement 37: 8.5.1-8.5.10, (2000)). In this method, synthetic oligonucleotides are designed to incorporate a point mutation at one end of an amplified fragment. Following polymerase chain reaction (PCR), the amplified fragments are made blunt-ended by treatment with Klenow Fragment. These fragments are then ligated and subcloned into a vector to facilitate sequence analysis. This method consists of the following steps.

[0296] 1. Subcloning of cDNA or genomic insert into a plasmid vector, or BAC sequence if the clone is a genomic sequence, containing multiple cloning sites and M13 flanking sequences, such as pUC19 (Sambrook et al., 1989, Id.), in the forward orientation. The skilled artisan would appreciate that other plasmids could be equally substituted, and may be desirable in certain circumstances.

[0297] 2. Introduction of a mutation by PCR amplification of the genomic region downstream of the mutation site using a primer including the mutation. (FIG. 8.5.2 in Cormack, 2000, Id.)). In the case of introducing the variant mutation(s) into the human TEKT5, GRINL1A, HSD11B1, or CHST10 genomic sequence, the following M13 reverse primer in addition to one of the below gene mutation primers can be used.

M13 reverse sequencing primer:
(SEQ ID NO: 45)
5′-AGCGGATAACAATTTCACACAGGA-3′.
GRINL1A rs11853270 Mutation primer:
(SEQ ID NO: 46)
5′-CATGGCCGAGTGCGCCATCTCCTTCTTCAAAGTCTCTCCTCTTAG
G-3′
HSD11B1 rs17015076 Mutation primer:
(SEQ ID NO: 47)
5′-GGGATACACATTCCTTGACTCAGAATTTTACTTCCAGGAATCCT
G-3′
CHST10 (rs1370627) Mutation primer:
(SEQ ID NO: 48)
5′-GGAAGCATCACACAGCGTTAAGAGCCGTTTCCTTCAGGTGTTAAG
G-3′
CHST10 (rs6716367) Mutation primer:
(SEQ ID NO: 49)
5′-GATAATGTAGAACTGGCCTTAACTGTCTTTCCTGGGCTCTGG-3′
CHST10 (rs7585898) Mutation primer:
(SEQ ID NO: 50)
5′-GATCAAAAGCTGTAGACTTGTAGACCAGAGTCTAGAAGGG-3′
CHST10 (rs17024136) Mutation primer:
(SEQ ID NO: 51)
5′-GACAGTGATCGTGATGTTAACTGTGGTGGCCCGTGTTCATAGC-3′
CHST10 (rs17024129) Mutation primer:
(SEQ ID NO: 52)
5′-CATGTCATTGCGGTTCTTTTTCTGTCTTGGCATATGATTAATTA
C-3′
CHST10 (rs7574684) Mutation primer:
(SEQ ID NO: 53)
5′-CTTGAGGGGAAACAGCACCGTAAACAGGGGCAGCAAGGCC-3′
TEKT5 Mutation primer:
(SEQ ID NO: 100)
5′-CAGTAGCTTGGCTGCAGGCTCCAGTGCTGGAAGGAATCGGCTG-3′
GRINL1A (SNP2) Mutation primer:
(SEQ ID NO: 101)
5′-CTTTTCTCTCCTGGTTCTCCACCTATCTCCCTGGTCTGTCCTTCTC
C-3′
GRINL1A (rs4774281) Mutation primer:
(SEQ ID NO: 102)
5′-CCTTTGGTTTCCTTTGTAATTCGTATGTGGGGTAATAGCTCTGTG
G-3′
GRINL1A (rs8037000) Mutation primer:
(SEQ ID NO: 103)
5′-GCGGATCATTTGAGGCCAGGGGTTCAAGACCAGACTGGCCC-3′
GRINL1A (rs6493943) Mutation primer:
(SEQ ID NO: 104)
5′-GCACTCCAGCCTGGGCAAGAGAGAGAGATTTGGTCTC-3′
GRINL1A (SNP12) Mutation primer:
(SEQ ID NO: 105)
5′-CCATAAGATTGACTGTGTGTGTCGGGGGAGGGTGGGGGGCCTAT
C-3′
GRINL1A (rs4774282) Mutation primer:
(SEQ ID NO: 106)
5′-GGTTTTAGAGCACTGCTGATTGCTGGTTGAGTCTCACCACTGGAG
G-3′

[0298] Mutation primer contains the mutation variant nucleotide at the 5′ end (in bold and underlined) and a portion of its flanking sequence. M13 reverse sequencing primer hybridizes to the pUC19 vector. Subcloned cDNA or genomic clone comprising the human GRINL1A cDNA or genomic sequence is used as a template (described in Step 1). A 100 ul PCR reaction mixture is prepared using 10 ng of the template DNA, 200 uM 4 dNTPs, 1 uM primers, 0.25 U Taq DNA polymerase (PE), and standard Taq DNA polymerase buffer. Typical PCR cycling conditions are as follows:
[0299] 20-25 cycles: 45 sec, 93 degrees
   [0300] 2 min, 50 degrees
   [0301] 2 min, 72 degrees
[0302] 1 cycle: 10 min, 72 degrees

[0303] After the final extension step of PCR, 5 U Klenow Fragment is added and incubated for 15 minutes at 30 degrees. The PCR product is then digested with the restriction enzyme, EcoRI.

[0304] 3. PCR amplification of the upstream region is then performed, using subcloned cDNA or genomic clone as a template (the product of Step 1). This PCR is done using the M13 forward primer in conjunction with one of the following gene flanking primers:

M13 forward sequencing primer:
(SEQ ID NO: 54)
5′-CGCCAGGGTTTTCCCAGTCACGAC-3′.
GRINL1A rs11853270 Flanking primer:
(SEQ ID NO: 55)
5′-CCTAAGAGGAGAGACTTTGAAGAAGGAGATGGCGCACTCGGCCAT
G-3′.
HSD11B1 rs17015076 Flanking primer:
(SEQ ID NO: 56)
5′-CAGGATTCCTGGAAGTAAAATTCTGAGTCAAGGAATGTGTATCC
C-3′.
CHST10 (rs1370627) Flanking primer:
(SEQ ID NO: 57)
5′-CCTTAACACCTGAAGGAAACGGCTCTTAACGCTGTGTGATGCTTC
C-3′.
CHST10 (rs6716367) Flanking primer:
(SEQ ID NO: 58)
5′-CCAGAGCCCAGGAAAGACAGTTAAGGCCAGTTCTACATTATC-3′.
CHST10 (rs7585898) Flanking primer:
(SEQ ID NO: 59)
5′-CCCTTCTAGACTCTGGTCTACAAGTCTACAGCTTTTGAT
C-3′.
CHST10 (rs17024136) Flanking primer:
(SEQ ID NO: 60)
5′-GCTATGAACACGGGCCACCACAGTTAACATCACGATCACTGT
C-3′.
CHST10 (rs17024129) Flanking primer:
(SEQ ID NO: 61)
5′-GTAATTAATCATATGCCAAGACAGAAAAAGAACCGCAATGACAT
G-3′.
CHST10 (rs7574684) Flanking primer:
(SEQ ID NO: 62)
5′-GGCCTTGCTGCCCCTGTTTACGGTGCTGTTTCCCCTCAAG-3′.
TEKT5 Flanking Primer:
(SEQ ID NO: 107)
5′ CAGTAGCTTGGCTGCAGGCTCCAGTGCTGGAAGGAATCGGCT
G-3′.
GRINL1A (SNP2) Flanking primer:
(SEQ ID NO: 108)
5′-GGAGAAGGACAGACCAGGGAGATAGGTGGAGAACCAGGAGAGAAAA
G-3′.
GRINL1A (rs4774281) Flanking primer:
(SEQ ID NO: 109)
5′-CCACAGAGCTATTACCCCACATACGAATTACAAAGGAAACCAAAG
G-3′.
GRINL1A (rs8037000) Flanking primer:
(SEQ ID NO: 110)
5′-GGGCCAGTCTGGTCTTGAACCCCTGGCCTCAAATGATCCGC-3′.
GRINL1A (rs6493943) Flanking primer:
(SEQ ID NO: 111)
5′-CTTTTTTTTTTTGAGACCAAATCTCTCTCTCTTGCCCAGGCTGGAG
TGC-3′.
GRINL1A (SNP12) Flanking primer:
(SEQ ID NO: 112)
5′-GATAGGCCCCCCACCCTCCCCCGACACACACAGTCAATCTTATG
G-3′.
GRINL1A (rs4774282) Flanking primer:
(SEQ ID NO: 113)
5′-CCTCCAGTGGTGAGACTCAACCAGCAATCAGCAGTGCTCTAAAAC
C-3′.

[0305] Flanking primer is complementary to the upstream flanking sequence and mutation locus of variable mutation (in bold and underlined). M13 forward sequencing primer hybridizes to the pUC19 vector. PCR conditions and Klenow treatments follow the same procedures as provided in Step 2, above. The PCR product is then digested with the restriction enzyme, HindIII.

[0306] 4. Prepare the pUC19 vector for cloning the cDNA or genomic clone comprising the polymorphic locus. Digest pUC19 plasmid DNA with EcoRI and HindIII. The resulting digested vector fragment can then be purified using techniques well known in the art, such as gel purification, for example.

[0307] 5. Combine the products from Step 2 (PCR product containing mutation), Step 3 (PCR product containing the upstream region), and Step 4 (digested vector), and ligate them together using standard blunt-end ligation conditions (Sambrook, et al., 1989).

[0308] 6. Transform the resulting recombinant plasmid from Step 5 into E. coli competent cells using methods known in the art, such as, for example, the transformation methods described in Sambrook, et al., 1989, Id.

[0309] 7. Analyze the amplified fragment portion of the plasmid DNA by DNA sequencing to confirm the point mutation, and absence of any other mutations introduced during PCR. The method of sequencing the insert DNA, including the primers utilized, are described herein or are otherwise known in the art.

### Example 6

### Alternative Methods of Genotyping Polmorphisms Encompassed by the Invention

### Preparation of Samples

[0310] Polymorphisms are detected in a target nucleic acid from an individual being analyzed. For assay of genomic DNA, virtually any biological sample (other than pure red blood cells) is suitable. For example, convenient tissue samples include whole blood, semen, saliva, tears, urine, fecal material, sweat, buccal, skin and hair. For assay of cDNA or mRNA, the tissue sample must be obtained from an organ in which the target nucleic acid is expressed.

[0311] Many of the methods described below require amplification of DNA from target samples. This can be accomplished, for example, by polymerase chain reaction (PCR). See generally PCR Technology: Principles and Applications for DNA Amplification (ed. H. A. Erlich, Freeman Press, NY, N.Y., 1992); PCR Protocols: A Guide to Methods and Applications (eds. Innis, et al., Academic Press, San Diego, Calif., 1990); Mattila et al., Nucleic Acids Res. 19, 4967 (1991); Eckert et al., PCR Methods and Applications 1, (1991); PCR (eds. McPherson et al., IRL Press, Oxford); and U.S. Pat. No. 4,683,202.

[0312] Other suitable amplification methods include the ligase chain reaction (LCR) (see Wu and Wallace, Genomics 4:560 (1989), Landegren et al., Science 241:1077 (1988), transcription amplification (Kwoh et al., Proc. Natl. Acad. Sci. USA 86, 1173 (1989), self-sustained sequence replication (Guatelli et al., Proc. Nat. Acad. Sci. USA, 87:1874 (1990)) and nucleic acid based sequence amplification (NASBA). The latter two amplification methods involve isothermal reactions based on isothermal transcription, which produce both single stranded RNA (ssRNA) and double stranded DNA (dsDNA) as the amplification products in a ratio of about 30 or 100 to 1, respectively. Additional methods of amplification are known in the art or are described elsewhere herein.

### Detection of Polymorphisms in Target DNA

[0313] There are two distinct types of analysis of target DNA for detecting polymorphisms. The first type of analysis, sometimes referred to as de novo characterization, is carried out to identify polymorphic sites not previously characterized (i.e., to identify new polymorphisms). This analysis compares target sequences in different individuals to identify points of variation, i.e., polymorphic sites. By analyzing groups of individuals representing the greatest ethnic diversity among humans and greatest breed and species variety in plants and animals, patterns characteristic of the most common alleles/haplotypes of the locus can be identified, and the frequencies of such alleles/haplotypes in the population can be determined. Additional allelic frequencies can be determined for subpopulations characterized by criteria such as geography, race, or gender. The de novo identification of polymorphisms of the invention is described in the Examples section.

[0314] The second type of analysis determines which form(s) of a characterized (known) polymorphism are present in individuals under test. Additional methods of analysis are known in the art or are described elsewhere herein.

### Allele-Specific Probes

[0315] The design and use of allele-specific probes for analyzing polymorphisms is described, for example, by Saiki et al., Nature 324, 163-166 (1986); Dattagupta, EP 235,726, and Saiki, WO 89/11548. Allele-specific probes can be designed that hybridize to a segment of target DNA from one individual but do not hybridize to the corresponding segment from another individual due to the presence of different polymorphic forms in the respective segments from the two individuals. Hybridization conditions should be sufficiently stringent so that there is a significant difference in hybridization intensity between alleles, and preferably an essentially binary response, whereby a probe hybridizes to only one of the alleles. Some probes are designed to hybridize to a segment of target DNA such that the polymorphic locus aligns with a central position (e.g., in a 15-mer at the 7 position; in a 16-mer, at either the 8 or 9 position) of the probe. This design of probe achieves good discrimination in hybridization between different allelic forms.

[0316] Allele-specific probes are often used in pairs, one member of a pair showing a perfect match to a reference form of a target sequence and the other member showing a perfect match to a variant form. Several pairs of probes can then be immobilized on the same support for simultaneous analysis of multiple polymorphisms within the same target sequence.

### Tiling Arrays

[0317] The polymorphisms can also be identified by hybridization to nucleic acid arrays, some examples of which are described in WO 95/11995. The same arrays or different arrays can be used for analysis of characterized polymorphisms. WO 95/11995 also describes sub arrays that are optimized for detection of a variant form of a precharacterized polymorphism. Such a sub array contains probes designed to be complementary to a second reference sequence, which is an allelic variant of the first reference sequence. The second group of probes is designed by the same principles as described, except that the probes exhibit complementarity to the second reference sequence. The inclusion of a second group (or additional groups) can be particularly useful for analyzing short subsequences of the primary reference sequence in which multiple mutations are expected to occur within a short distance commensurate with the length of the probes (e.g., two or more mutations within 9 to 21 bases).

### Allele-Specific Primers

[0318] An allele-specific primer hybridizes to a site on target DNA overlapping a polymorphism and only primes amplification of an allelic form to which the primer exhibits perfect complementarity. See Gibbs, Nucleic Acid Res. 17, 2427-2448 (1989). This primer is used in conjunction with a second primer that hybridizes at a distal site. Amplification proceeds from the two primers, resulting in a detectable product that indicates the particular allelic form is present. A control is usually performed with a second pair of primers, one of which shows a single base mismatch at the polymorphic locus and the other of which exhibits perfect complementarity to a distal site. The single-base mismatch prevents amplification and no detectable product is formed. The method works best when the mismatch is included in the 3′-most position of the oligonucleotide aligned with the polymorphism because this position is the most destabilizing elongation from the primer (see, e.g., WO 93/22456).

### Direct-Sequencing

[0319] The direct analysis of the sequence of polymorphisms of the invention can be accomplished using either the dideoxy chain termination method or the Maxam—Gilbert method (see Sambrook et al., Molecular Cloning, A Laboratory Manual (2nd Ed., CSHP, New York 1989); Zyskind et al., Recombinant DNA Laboratory Manual, (Acad. Press, 1988)).

### Denaturing Gradient Gel Electrophoresis

[0320] Amplification products generated using the polymerase chain reaction can be analyzed by the use of denaturing gradient gel electrophoresis. Different alleles can be identified based on the different sequence-dependent melting properties and electrophoretic migration of DNA in solution. Erlich, ed., PCR Technology. Principles and Applications for DNA Amplification, (W.H. Freeman and Co, New York, 1992), Chapter 7.

### Single-Strand Conformation Polymorphism Analysis

[0321] Alleles of target sequences can be differentiated using single-strand conformation polymorphism analysis, which identifies base differences by alteration in electrophoretic migration of single stranded PCR products, as described in Orita et al., Proc. Nat. Acad. Sci. 86, 2766-2770 (1989). Amplified PCR products can be generated as described above, and heated or otherwise denatured, to form single stranded amplification products. Single-stranded nucleic acids may refold or form secondary structures that are partially dependent on the base sequence. The different electrophoretic mobilities of single-stranded amplification products can be related to base-sequence differences between alleles of target sequences.

### Single Base Extension

[0322] An alternative method for identifying and analyzing polymorphisms is based on single-base extension (SBE) of a fluorescently-labeled primer coupled with fluorescence resonance energy transfer (FRET) between the label of the added base and the label of the primer. Typically, the method, such as that described by Chen et al., (PNAS 94:10756-61 (1997), uses a locus-specific oligonucleotide primer labeled on the 5′ terminus with 5-carboxyfluorescein (FAM). This labeled primer is designed so that the 3′ end is immediately adjacent to the polymorphic locus of interest. The labeled primer is hybridized to the locus, and single base extension of the labeled primer is performed with fluorescently-labeled dideoxyribonucleotides (ddNTPs) in dye-terminator sequencing fashion. An increase in fluorescence of the added ddNTP in response to excitation at the wavelength of the labeled primer is used to infer the identity of the added nucleotide.

### Example 7

### Additional Methods of Genotyping the SNPs of the Invention

[0323] There are a number of methods that can be employed for genotyping a SNP of the invention in addition to the methods described herein. The invention encompasses the following non-limiting types of genotype assays: PCR-free genotyping methods, Single-step homogeneous methods, Homogeneous detection with fluorescence polarization, Pyrosequencing, “Tag” based DNA chip system, Bead-based methods, fluorescent dye chemistry, Mass spectrometry based genotyping assays, TaqMan® genotype assays, Invader genotype assays, and microfluidic genotype assays, among others.

[0324] Specifically encompassed by the invention are the following, non-limiting genotyping methods: Landegren, U., Nilsson, M. & Kwok, P. Genome Res 8, 769-776 (1998); Kwok, P., Pharmacogenomics 1, 95-100 (2000); Gut, I., Hum Mutat 17, 475-492 (2001); Whitcombe, D., Newton, C. & Little, S., Curr Opin Biotechnol 9, 602-608 (1998); Tillib, S. & Mirzabekov, A., Curr Opin Biotechnol 12, 53-58 (2001); Winzeler, E. et al., Science 281, 1194-1197 (1998); Lyamichev, V. et al., Nat Biotechnol 17, 292-296 (1999); Hall, J. et al., Proc Natl Acad Sci USA 97, 8272-8277 (2000); Mein, C. et al., Genome Res 10, 333-343 (2000); Ohnishi, Y. et al., J Hum Genet 46, 471-477 (2001); Nilsson, M. et al., Science 265, 2085-2088 (1994); Baner, J., Nilsson, M., Mendel-Hartvig, M. & Landegren, U., Nucleic Acids Res 26, 5073-5078 (1998); Baner, J. et al., Curr Opin Biotechnol 12, 11-15 (2001); Hatch, A., Sano, T., Misasi, J. & Smith, C., Genet Anal 15, 35-40 (1999); Lizardi, P. et al., Nat Genet 19, 225-232 (1998); Zhong, X., Lizardi, P., Huang, X., Bray-Ward, P. & Ward, D., Proc Natl Acad Sci USA 98, 3940-3945 (2001); Faruqi, F. et al. BMC Genomics 2, 4 (2001); Livak, K., Gnet Anal 14, 143-149 (1999); Marras, S., Kramer, F. & Tyagi, S., Genet Anal 14, 151-156 (1999); Ranade, K. et al., Genome Res 11, 1262-1268 (2001); Myakishev, M., Khripin, Y., Hu, S. & Hamer, D., Genome Re 11, 163-169 (2001); Beaudet, L., Bedard, J., Breton, B., Mercuri, R. & Budarf, M., Genome Res 11, 600-608 (2001); Chen, X., Levine, L. & PY, K., Genome Res 9, 492-498 (1999); Gibson, N. et al., Clin Chem 43, 1336-1341 (1997); Latif, S., Bauer-Sardina, I., Ranade, K., Livak, K. & PY, K., Genome Res 11, 436-440 (2001); Hsu, T., Law, S., Duan, S., Neri, B. & Kwok, P., Clin Chem 47, 1373-1377 (2001); Alderborn, A., Kristofferson, A. & Hammerling, U., Genome Res 10, 1249-1258 (2000); Ronaghi, M., Uhlen, M. & Nyren, P., Science 281, 363, 365 (1998); Ronaghi, M., Genome Res 11, 3-11 (2001); Pease, A. et al., Proc Natl Acad Sci USA 91, 5022-5026 (1994); Southern, E., Maskos, U. & Elder, J., Genomics 13, 1008-1017 (1993); Wang, D. et al., Science 280, 1077-1082 (1998); Brown, P. & Botstein, D., Nat Genet 21, 33-37 (1999); Cargill, M. et al. Nat Genet 22, 231-238 (1999); Dong, S. et al., Genome Res 11, 1418-1424 (2001); Halushka, M. et al., Nat Genet 22, 239-247 (1999); Hacia, J., Nat Genet 21, 42-47 (1999); Lipshutz, R., Fodor, S., Gingeras, T. & Lockhart, D., Nat Genet 21, 20-24 (1999); Sapolsky, R. et al., Genet Anal 14, 187-192 (1999); Tsuchihashi, Z. & Brown, P., J Virol 68, 5863 (1994); Herschlag, D., J Biol Chem 270, 20871-20874 (1995); Head, S. et al., Nucleic Acids Res 25, 5065-5071 (1997); Nikiforov, T. et al., Nucleic Acids Res 22, 4167-4175 (1994); Syvanen, A. et al., Genomics 12, 590-595 (1992); Shumaker, J., Metspalu, A. & Caskey, C., Hum Mutat 7, 346-354 (1996); Lindroos, K., Liljedahl, U., Raitio, M. & Syvanen, A., Nucleic Acids Res 29, E69-9 (2001); Lindblad-Toh, K. et al., Nat Genet 24, 381-386 (2000); Pastinen, T. et al., Genome Res 10, 1031-1042 (2000); Fan, J. et al., Genome Res 10, 853-860 (2000); Hirschhorn, J. et al., Proc Natl Acad Sci USA 97, 12164-12169 (2000); Bouchie, A., Nat Biotechnol 19, 704 (2001); Hensel, M. et al., Science 269, 400-403 (1995); Shoemaker, D., Lashkari, D., Morris, D., Mittmann, M. & Davis, R. Nat Genet 14, 450-456 (1996); Gerry, N. et al., J Mol Biol 292, 251-262 (1999); Ladner, D. et al., Lab Invest 81, 1079-1086 (2001); Iannone, M. et al., Cytometry 39, 131-140 (2000); Fulton, R., McDade, R., Smith, P., Kienker, L. & Kettman, J. J., Clin Chem 43, 1749-1756 (1997); Armstrong, B., Stewart, M. & Mazumder, A., Cytometry 40, 102-108 (2000); Cai, H. et al., Genomics 69, 395 (2000); Chen, J. et al., Genome Res 10, 549-557 (2000); Ye, F. et al. Hum Mutat 17, 305-316 (2001); Michael, K., Taylor, L., Schultz, S. & Walt, D., Anal Chem 70, 1242-1248 (1998); Steemers, F., Ferguson, J. & Walt, D., Nat Biotechnol 18, 91-94 (2000); Chan, W. & Nie, S., Science 281, 2016-2018 (1998); Han, M., Gao, X., Su, J. & Nie, S., Nat Biotechnol 19, 631-635 (2001); Griffin, T. & Smith, L., Trends Biotechnol 18, 77-84 (2000); Jackson, P., Scholl, P. & Groopman, J., Mol Med Today 6, 271-276 (2000); Haff, L. & Smirnov, I., Genome Res 7, 378-388 (1997); Ross, P., Hall, L., Smirnov, I. & Haff, L., Nat Biotechnol 16, 1347-1351 (1998); Bray, M., Boerwinkle, E. & Doris, P. Hum Mutat 17, 296-304 (2001); Sauer, S. et al., Nucleic Acids Res 28, E13 (2000); Sauer, S. et al., Nucleic Acids Res 28, E100 (2000); Sun, X., Ding, H., Hung, K. & Guo, B., Nucleic Acids Res 28, E68 (2000); Tang, K. et al., Proc Natl Acad Sci USA 91, 10016-10020 (1999); Li, J. et al., Electrophoresis 20, 1258-1265 (1999); Little, D., Braun, A., O'Donnell, M. & Koster, H., Nat Med 3, 1413-1416 (1997); Little, D. et al. Anal Chem 69, 4540-4546 (1997); Griffin, T., Tang, W. & Smith, L., Nat Biotechnol 15, 1368-1372 (1997); Ross, P., Lee, K. & Belgrader, P., Anal Chem 69, 4197-4202 (1997); Jiang-Baucom, P., Girard, J., Butler, J. & Belgrader, P., Anal Chem 69, 4894-4898 (1997); Griffin, T., Hall, J., Prudent, J. & Smith, L., Proc Natl Acad Sci USA 96, 6301-6306 (1999); Kokoris, M. et al., Mol Diagn 5, 329-340 (2000); Jurinke, C., van den Boom, D., Cantor, C. & Koster, H. (2001); and/or Taranenko, N. et al., Genet Anal 13, 87-94 (1996); Aomori, T., Yamamoto, K., Oguchi-Katayama, A., Kawai, Y., Ishidao, T., Mitani, Y., et al. Clinical Chemistry, 55(4), 804-812 (2009); Lin, C. H., Yeakley, J. M., McDaniel, T. K., & Shen, R. (2009); Konstantou, J. K., Ioannou, P. C., & Christopoulos, T. K. European Journal of Human Genetics, 17 (1) (2009); Li, X., Luo, J., Xiao, P., Shi, X., Tang, C., & Lu, Z. Clinica Chimica Acta, 399 (1-2), 40-44 (2009); Hui, L., DelMonte, T., & Ranade, K. Current Protocols in Human Genetics (SUPPL. 56), 2.10.1-2.10.8 (2008); Maresso, K., & Broeckel, U. (2008); Browning, S. R., & Browning, B. L. American Journal of Human Genetics 81(5), 1084-1097 (2007). In addition, the genotyping methods described and/or claimed in U.S. Pat. No. 6,458,540 and the methods described and/or claimed in U.S. Pat. No. 6,440,707 are also encompassed by the invention. All of the references and patents are hereby incorporated herein in their entireties.

[0325] The entire disclosure of each document cited (including patents, patent applications, journal articles, abstracts, laboratory manuals, books, or other disclosures) is hereby incorporated herein by reference in its entirety. Further, the Sequence Listing submitted herewith is incorporated herein by reference in its entirety.

[0326] While this invention has been particularly shown and described with references to preferred embodiments thereof, it will be understood by those skilled in the art that various changes in form and details may be made therein without departing from the scope of the invention encompassed by the appended claims.

[0327] It will be clear that the invention may be practiced otherwise than as particularly described in the foregoing description and examples. Numerous modifications and variations of the invention are possible in light of the above teachings and, therefore, are within the scope of the appended claims.

The application's sequence listing, which the Patent Office published only in electronic form, follows.

SEQUENCE LISTING (113 sequences)

SEQ ID NO: 1 - DNA, 125639 bp, Homo sapiens
  allele (1)..(125639): GRINL1A Reference Allele
gctgaggctgcaagtagccggcgccgtcccgcgtcgcccccgcgcagggcgggccccgcacgcttattctgcccgggaggaacgccggcgtccagcccgctaccgaccgccgctgcgggatgctgcgctccacgtccacggtcaccctgctctcgggcggcgccgccaggacgcccggggcgcccagcaggagggtgagtagcgggggcgggagccgccgccgtcccgttcccccatcccggccgccccctctagaggggactagggatgggaaagctcgggagccagcacctggccccgacgccccaccctgggctcaactccccggtcctgtgccggctctggcagtgaccctcccgcttgaggtttcagggggcccaccagctggtaggagagggcttaggggactttatggaattcccagagatttcctctccttcctgcctttctgtcaagccgagtttattggcggcaccagtttaaaaatgaaggaagacatttgtgcagtgtccctaccttgagactcaaaagtaatgaatgtatttaaaactcaaactttccttcttccattaattaaaagaaagatggggtcacttgtgtccactagtgatagggtatccactagtgatagggtaattctggagtggggttagccaaggtgggcaaaccagaacagcagccggccgcccaggagcccgactgtgtgggactccggtttatgtaaaccactttcttctgtctgatttaaatattagcacagtgacaacaatggcagcactgaaagcttgggacagcatctccagggaaggtttccctttggaagtgctgtttctttttgatctttgtggcatcttttcccatctctccagatgctctgtaaaagaaatgctccatctttctaacacggtcagcaccttagagccacagccaggggcttggcttgtggctttttagttcttccatttatcatgatgttcaatacttatcatttggtacctctttgctctgattgagacttctgtaatcgtgtttcctcaagatttaaacaggtggttaagtccaaagcaaaacccccactggttctgtctgcgtgcaggcttggacctgcttatttgcttttacatgccttaagcgagtgatggtggtcaccttataagctgtctttcttagctctagaagaaaggtgtgttactcttgggcatgggccaactgatggattctggggtgtgtgtgtgcgtgcactcaccagacacttaggttgtgtacacaggcgcacacacacacacacacacacacacaccccagaatccatcagttggctcatgcccaaggttgacagaactccagttgtccaatcattagcatcatagagtaagatctacattgggtccaagggggtttccaaccacagtcctggccttactctaagttgggtgtttgtatttttctatggaaatctttctcaatttgaacacaattgcaactgagaaagaatgaagtcactgaaaagctaaccctgagccctgagaggatcatatgtgtgaccagactgcatgaattgcatgaaattctctgtaacttcccttccagaggtggggattagttggggtacctaacctaatacggtgggttgatacaaatgtgactagtatacaaataacatttctgaagattttgggtcaaacgtttcctttggaatatttatttaattataggtgctttgctgtcggacacattgtgacactcttgaaaagactttgccttttgaataagatggcagacgtattttggactggagaactcagggctcgggatcaggccattcagggctgtcctgggtacactggtacttgtttctggaaggaaggtatctaaagggtctagggttctgcccatctttatggtttctagctctgctcatgatttgcagatgttacaagtactatctgtgtgtgtgctggggattgtgtgtgtggtgggaagctgtgagatgttgattaattgatttattgaacattcataaacctttctctgtgtggtaaagggctggcattggggtccgccctacctgtagaggcagacattttcccaaactaacatcaaacaaagtggtgatggttatagtggggtgaagagtttacaaagttctgtagaagctaaaataaaggttcttcctgaggcatcaggggaaggcctctcactaaaggtatgtttttttgagatggagtctcactttgtcatccaggctggagtgccatggcacgatctcggctcactgcagcctccacctcccaggttcaagcagtcctcctgcctcagccttccgagtagctgggactacaggcgcacaccaccatgcttggctaatttttgtatttttagtggagacagggttttgtcatcttggccagcctggtcttgaactcctgacctcaagtgatacaactgcctcggcctcccaaagtgctgggattataggcatgagccacccagccccgcctactggtgatgtttgagtttaatcttgcaggatgagtagaatttgtaggggaattgacattattgggatactgaaaggaggaaataaccatctcaatggaatacttggcatatataatcatgtactgcataaccacattttggtcaacagtagccaggatatatgacggtggttggaatggtaggctatctcatatcgcctaggtgtgtggtaggctataccatctaggtttgtgtaagtgcactctatgatgattacgcaacgacaaaaatcatcaaatgatgcatttctcagagtgcatctccacggttaagtgacacatgactactttatcatgatggcaaattggacctgctttgggacaaaatacctattgtttagaaaagcaggaacgggatgtcctgaaagtaaaattgtagaccaaataatcattggaagtgtacctttcattgaaagttgttcagcaaatactgtattgttctgttattcctctctgatgatggacaagtgatggtcttgaacatgttatccattaaaattgtatttctggttcatccaaagagctcatcaaattgggtactgcaggggaaaccagcctatgtgggtccagatattcaagccaaccagaagtggtggtgacagctgacactgagcagggactcctgcgagccagctgccaagggttatgtggctggctggactgccaccagttagcctttgttcaatggctgccacctgcaatttgtatttccttcttatctgaaatcacctctcaaggaaaaaaaaaccaacaggtggagagagtaatttctgtcagctgataaacaaagctctgaaaggcatttatggatgccaaccagcagaagttgtgaaattaaaaaaacttccttcaaaccagttgtgcactaaaaatagttttatctatggcaacagcaggaagacaaattgactggagaataaccacagccagaagatgaccttggggaatggggggaaacgattttaaaaatattgaccttgcttcatgcttttgaaaggaattttataaatgccagttagtcttgctaaatgggcctttgaaatggaaggttggttgtgtggctgggtcgtgtgctttgcggggaaggcatgtgttgctttatggcttccccacaaagcacacaaccgggtcacacaactgacctttcggcacaatacttactgccgagtatttttggctaagctgttctgatcctgggctgtggaatgatagatctgtcaaggatcttctccagcaccttgctctcttgataataaaagactgttggctggtgttgctgctatcgtgacccgtcactggcacagagaaaaaacaaaacccaacaaggtcacaggataggactatctcctagcctgcccttgctgatatttctttctatttggcaaaggcttcctctgttaaacactggaatgggcctgctagtcattgttccttggctaatgtgtccctctcccatgtcccattgctgcctgactgggctaagttgtgagggtttggaaccaaggcgtcctctgggctaagggcagggcttaaacctgtgccggtcaaaaatgatggttgtaggctcagaaaaagaggtgcccagctctatgcttttgatctttcacattgccttgtttgatagaggatgaacagacctgaattctggagactcgtaaggaaacttgatttcccctagacatttatggagatcccatggcttttctacaaaggatatggaatgtgattttgacccatttgtctctgggggcactgatggagtgctgcgtatgaggtccctgttgtagtttacctatgctgtgcatccatatctgaacaagagacctggaggctggtgtcactaagccctggtcactggggaaggctttgaagtcaattagcctcaaatgttcttgtctaattgagttcaaggagctgtgggcccagggctgactaactagagaccatgttaaatatttcaacccaagatacttctcagcactcatcatgccttatggtcttacggaattccagtacttctccagcacacagaagagcaatacagtggtgtttacctctttccctctttggtgagtgatagttcctaagtgtcaaccacactcctggctctttttcactcttaaaggccggggtgatctttctaaaatgctaaatctagtctcctgactcgtctgcttcaagagcctcctcagtactgccaggaaaaagttcacactccttagtgtagcatccaggccctctggtttggcccgtgcctgtgctgtttcccctccctatatgtggtcttctcagatattccaaatcgtttgccatttccccgagctttcgatgccgttccttgcctctttgcttttcttcatgtttctcctctgatgagtgttgtctcctctaggaagcctgccctgaaacctcaaccctccttctcgtgttcccctagaggcctgtgcatgccaccattacttgcgtcacctgtgattacctactggaagacagggcttaggaaccacccctccccaggcctggtggaataggcagttaaaaacagaaatctcaccaggtcctacgtagaggagccacagttaacattgaattggcaaatggaaaaacaggaagagaagccttgggttaaatccatcccatcacttctgacccacctgggcaggaaacgggtgacaaatacatgggaatgctggcccaggtgaggaggttgacagttctgggaagtcctccaaatattcgagttgcctcatcctgctgcacagttggagcttcatccctttggttcagtcagtggttctcaaccagttatacacagaatcactgggaggcttaaaatagccatgtcgaggcctcatcccaaaccaattaaatgggaacatcttaaagtacagaaaagcatgagtattttttaggaagcttcccaggcgattctaatgtgcagcaaggctaacaatatttctttaagcattactcccttctatagctttcttggaaatgcagacactcctgggacagtgttgcagaaaggtcccttgagccttgtgggatgaagggcagggtggtgatggggcagggagggggagtcctcgcactccaagtcacactggcatctttgtgtgccttcatccacctgtgttttctctctggatcttggcgtttggggcacattgtgtgcctagtacagaacacagccacagaaagcaggaatgttttgtatgcctctgagctaagaatggttttcacaggggcctgcaaaacctaaatatttactgtctggctctctacagaaaaagttcgccccaccctgatgtagataattgggctgcaagttcagggccacagcagagccaagaggtctaatctagatggggcatacactgttccgcatgcagcctgctgcaggctcctgggatttgatccttgtgctgagcagagagtgtggggtctgttccccctagccacacttacaagggccccaccttttatcattaaggggagctgggcagggacccacagtcacaaagtggaacaggcctgagagaaatgtaaatgcacttggctaatttccttagggaaatccatctttgtaaactggcaaacccctgtcacctccctgaatcatcttctccactccctttttatttgagatagatatttttcccctgggtgagccaaggtgcctgaagttgagagcatgatgttactggatccgcagagtaccccgtaggtgagacccaggccctcatctccacaaaagggtcagaaacaaggcctgaggggacccatgtagctccccaggggccctgagttgccaaaaagggttttgttgtgctttttcttgtggaggaaacctgaatgctacctgtccctcccttgctatccttcccaggggggttggtttcaagaaagtgcaaggcactccagggagtttcaggtatattcttactttgttttagttcaacctagaaaaaactacaaaacccaacactgagcgagcgcccatcatgtgttgatactatgctaagcaccgtaggggctatattaagtggtgacggtacaaagcttacttgatcactccccctatgttttcccttccgtccattgtgtggtgcatggaacactggaggcactgaaaaatgaccagttggattattgaaatgaactcagatttgaatgttagtctcttcctccaaagatttgaatgactcctcattgtcttctgactagagccagtgcttctctatcatgcatttgtagattgatagttcagcccctatctgtttgtccatttgcctgtcctacccaggcttaggctgcaggttcttattcttggaacttgccgacatctgtgtgtttggcacagactagaacgccttgcctgatagctgtctgctgttgttatgatggtgggttctccaaacctcactgacctgtaaagtcctttctgtccttctatacccagcttaaattgtatcccgagggtccttcctgagggactttcccatatattcccacctcccattaagattagtgttcttcttcctatattcccatgataataaagaatgtttacagagtgcttaatgcgtgccagaaattgtcctaagctctttacacacattagctaatttaatcctcacaacattcctaagagggtatagtattgttagttctttttacaactagggtaatggaagcactgaagactaagtggctttccaaaggtctcaaagctagtaggtgtcagaaccaatactggaagccaggaagtacatttccactatgatttaaccacaaagctatcctgtctctctacaccttgtattggttattccaagtgttcttgattgccttgtttgggtatatttctagattatgtactccttggaggccagcatttttttttttttttgccatcgtcgtaccctcatagtccctaaaaatatttcacaagtaataggtgctcagtaactgagtaataaagtatgctgagtccagcttcctgctttgatctcctggaaggaacccttgcccccagggacagctggttcggtagcagtggtgttcagggtaggatgcagttcttcgcattgtgcataacacaagccctgaaccagctgctttgggaacccctgggaataaagtgccctacctgcctttcaggcactgccaagcctggggcatctctggagattgtgtatccgagtttcaggagaccatggagatcagcctcgtaaaatgctcggaggtaaggaatgctgccttgatgttactcggggagattttcccatggggagattgcggaaggtgaatgaatggagggaggtagactgtactcggacaactttatgggtggttcaggggttactgtccttagtgcttctgttagggattcagagtaccttttagacctttagaatgtcccccttgctgctcctgaagcagtcctgtggaaggattagtctctttctggatctgtctcttcccgacatattttctcccagtctttgttattactataactactattattattttaatcaaaaccttacatatcttaacatcgttgccaccaacacagaaatctgtttccttaagaatatcttccgcctacatctacacaagttatcagggtatatttaaaaaattaaaatgggattattcttaatgttttgttctgcaactttctttcttccccatggccatacatttggctatcttgtaaggaagatgtgtgattctgttctaagctgggtttaaattgctcctgaacagccagtccatcagtgggtcagtgtttattaaagaaaaactagctttgctccttaatgttttgatcaaagcacctctgttgacaagagtaaacttcagacagggtgctgcagtagcctcaagcgcctgctgcaactgccaaatgtctttgaggtcatatgttttattttacaagttcattttattttatgcattctgtttaccttgtggctttgtatacctcagggtattgctcagtgtgagagcttcatataagggttgcccagctcatcataggaagtgtgttgaggaatatagatgggcagatgaagaatgggctcaagccaggggagggaccatctaacttttgagtgattggacccatgggaccccctttctgaaaattatgaccattaaggattacccctctaaaataatcaaccaaccgaaagtcatcacttacagtgttaatgtctctgattcattgaccaaattgttattttcatggaaacaggactgtgaggctaagcaggtctgtttcattttgaagcatataggatgatgataatatctagataatagtaaaaatatctggctgggtgcagtggctcatgcctgaaatcccaacacatttggaggctgagacaggattgcttgagcccaggtgtctaagacccatgtgggcaacatagtaagactctgtgtctacaaaaaataaaaaattagccaggcatggtgatgcatgcctgtggtcccagctatttaggggcctgaggtcggagaatcacttgagcccaggagattgaggctgcagtgctatgattacaccactgcactccagcctgggcgacagagcaagacccagtctcaaaataaataaataatcaaataaaaataaaaatatctaatattcatagaggcttactatgtgacactctccctttatcccattttacccttgagattcagagagattaagtaactttcccgtagacacacagctagtagatgttggagcctgtgtatgtgtgtatgtgtgataggcatatatgtacgtgtgtgcacacttgtgtgtgtgtgtgtgtgtgtgtgtgatgtggtgcaggagaaaaggacttccttttccctgcagaattatgcatggactagacccagcctaataggagattgttgagcaccacaggtttggattgtctctgtggtctgagttacactttgatgcttgtgcaaatgtcagactggtttcaaccagtctgaggggcctggagccagagagttgcctttctctggagggactcaagattccctactcaagatcagtgttgttgcccaccaggaaagagagctacctggtagtatggcttggtttctttttggccaacatgactgacggtgagctttgaaggttgcttgtaaagttggccccacaagaggcaatgatagccctgggggtcaggccacatctgattccggggtccctgggggatgatgcttgccaagaggaggatgaggatggagagggatcttgaaaccaagtcatgtgatttaaagaactggggttgtttcgtccagaagaaaggaagttcaagggacaggaggactgcctagaaaaaggggaattagtttgcagtccgaggacaaccctgggtccattaggtagaaattctggtgtaagctcagatcagcaagttagaggtgcctggtagcaaaatgcaatgccttggagggtggcaatggtgtacgtggaagtgctaacatgggtcccaaacctgggctccctaacctgttcatggaaaatgaacaggttggtgccacctgtcaggtacatttttgggtgttgggtttcttcaaaggtgggcaggttgaactcaagagatttttgacattccctctagccctgggcttctaggctgcagggtggttttgctaagaggccaccctgtggaccagtgcagatctgtgaacctgccaaccagactgggacgggggtggagaggatttgtttgctagggctgccatgaaaactaccacaacgccattggcttaaacaacagaaatttcttgtctcacagttctggaggttagtggcccaaaattaaggtgttggcaaggttggtttcttctgaggtctgtgaaggaactctctgttccaggcccttctccttggctgttgatgggtcgtcttaatgtttatatgatgatcgccctgtatgtgtgtctctccccaaatttcccactcttataaggacaccagtcattttgatttagggccacacttatgatctcatttttacttgattacctctgtaaagaccctttcttcaaataaggtcacattctgagatgccaggaaggcggtcaggacttcaatggatgaattttagagggatgcaattcaacccatattagggagccaacagcactcccgcgaactgagcccacatggcatttcaggcatgtgatggggaccatgagtataagagctaagaaagtaagccccggagactgcctgggttcaaatctcagctctgtcatttcccagccatgtaacccttcagaggcttagcttcctcatctgaaaaatggggcaggtaagagaatctcttaccataggtttgtggtgaggcttaaatgaataaatacctgtaaaacacttagaagatgcctatacatggttagctattactattattactgttattgtcccctcgtactacagattatagtagtccatttttccctctgttgagtaggaaaatgactttgcccctaagtcacccttcgtcaacagaatatgataaatcacacaaattgtagcttctctcactgagtggtataatgcttttttatttttaacagaaatggtgcaatttagactttaaaaaatcatttaggaacctttatccgatatttcagtgaaattttttggcagcctttaataaactgacgtgagaatctcagtgactagtgacaaatattcatggtgacatagctaattaaggagtcagatgtcttaccaaaactcataagcattatattttcttctcctaagcctttccagctaactgtcttacttttagtctgtatccaacaagcagggacagcttttttttttaaattgtagcaatgtacttgtgagatttaccattttgaccctttttaagtgtatagttcagtggcattaagtgcatccacactgttgtgcaactggcaccaccatctatctcgaggatttttttcatcttcccaagctgggattccatgcccattaaatactaactttccctgtatccttaccccctggtcaccacagttccactttctgtctctatgattttgattactcctggtacctcatctaagtagaatcatacagtatttgtctttttgccactggcttatttcacttagcatagtgtcttcaaggtttatccatgttgtagcatgtgtcagaatttccttcctttttaatattgggtaatattccattgtatgtataaataatattttgtttatccattcatctgtcaatggacatttgggttgcttccaccttttggctattgtggataatgctgctatgaacatgggtatatggacttttttgaaaaaaagttgtgattaaacatgtacatgtatattgtagaaaaattaaatatataggcaagtagaaagcaccctcccttcccaatagagatatccactgtgtatattttggcttctttccctgtaactatatttttgcctatacttgtgaaatgagatcattctatacatattcttatggaaactgagccattggtaaagaaatgtttgaaatagatcaagtgatttggtagtttccttccttgagccccagggtggtgggtgcctgtgctgtaccaggctggcctggtactgtgaaggtaaggctggccttatctcctctatggctcctgtatgatcaggacagtgttccccaatggaagtaggggaaatgggctgtgagaagcccaaggtcatctggctctttctgccccaaatgctgactcctaactggcctctcctttccctctcttctaggcaaatgtttgcagactacggctgaccgtacctcctgagagtccagttcctgagcaatgtgaaaagaagattgagagaaaagagcaggtaaggtatctccgaggcaaagccccaacaagttccagcctctatacccttaacccactctcccatctcctaaccaggccattcccagaggctgggtgtctgcacctctgttgaggagaaggccctctcaaccttcccacctcatctcccgtcttcccagaagacagagagctctccctagccggctctgccaccgacgtgccctgctcttgtttcttggtgaacactatggctttgtgttaccttgaagctgcagggacactggtcttagtgacaggtgctgtggcggggaacgtgggttttcctgaaacagcccaatccagttgcttcaaagggcctattgtgagcagctggcggggctggaacctttctcagcagcttggagcagcagccgggggctctgctcccgcagaagagaggaaaggctggcaggcaggctggtgcagggaaagggcactttcttggctgggggtaggaggcattcggcaaacatttttgtgacagctcctgtgctaagtgctgaggccgtgaagataagtatgtccttgccttgggggaatttgcagttttctgggtgagacgatgatgtgatatttcaggtgttaagatccagccctatatgacggaatctgggaacacagagaagggaataactgactgcttgggaggtgacagtgaagttggaggcttgaaggataaagaggaggtcctgctgacctctaggcctgtggtcctggccgacccattttactcattcataattatggggcacctactgtattccaggcactgttgtatacagtgggaatatagtagggaacaaagcagtaaaccaaatctgtcatccatggaacttatattctagtgggacaagaatggaagtaaacaaaataattaagtacattttatagaggttaggaggtggtaagtgctgatggagacaaagtaaaagaaggggtaggggtgccaggaagtaggcagtactttttcttgagcatgtattttatatgattataaagtaaaacaaaataaaatgatataaatttcataaatggagtcataacatagtgacctcttgaaatacaagcttgctttagagttaaccactaatgtggtcaactataaaaaagaaagcttctcatcgatggctaagtgtttgataatgtccctaagtttaccataggtctctgtctctccttgccctctcctccccactttctaccaaggacagagagctgcctgtgctgatgcaaatgatgaatgccagggaaaggaagtagggagaaaagcaaatgaagttctgactagagaaaggtgaggagtaaaattgctgatctgcctaaaaagagtggatgagttccactaaaaagatccagaaaaacagctagttctgggttgcagaagggaaaagatgagggggatatgggacctctggaaaataaggtttcactcagagatgaatggggtcctagtaaaggacctagcagccagtttgaatgggctttcactggccaaaatgggaacagctggagcatcaaaaagaataatgacagtcatggcttataacacatcgaatattaaaaaaaatccatacgtttgtagtgataattggagaaggggagtagaggcacgagatcagaggataaaatagggaaggctcccttttttttatagaacactagctaataagtttagaaaatctttgttttgtaacctccaggtatactcatcaatagatgcaaaaataagttggtgaaagattattgtaggatattctcaaagtatcaccccagcggattactgattctaaagggacagtaccttcacagtggagtaggcaggcagccagcatttcaaccaagtgatccaacctaacttcaccaatagtggaacgagctgatgttacatgacttctgaggtgattcacctaagaggtgcacatcacatatgtaatattcatgccaaacttgtttaactgaatctaataataaggaaacagaaaaccaaaatgtgggacattctgcaaaacaattggcctgaatccttcaataaattcaatgttatttttaaaaaagatgagaatttgttgcagataagagactaaagagacataacattaaatgtaatgagtgaacctggattagatggtggcaaaaaaaattatataaaagatagagcacatggacgcaggaaggggaacgtcacactctgggggactattgtgggatggggggaggggggagggatagcattaggagatatacctaatgctaaatgacgaattaatgggtgcagcgcaccagcatggcacatgtatacatatgtaactaacctgcacattgtgcacatgtaccctaaaacttaaagtataataataataaaataaaataaaagatatactgggatgactatacaattttgtatatgaactatatattacatattattgaataaatgttaattttcttgtgatgatggtactatggttatgtagttgagtggctctttcagcttctgtgtagctttgaacattctccacagacaaagtttgggagtaaaagtcctaagcagagagtggaagtggtcaggcttcagctgctacacccctgctgatgagcaggattgagtggggccatctgtcactagggagtgtccccttctgtcctcactgctcctctccctgcctgtcccttttagagctaatggcttggtccaagacatgggtctgggctgtgtccaggtgctcagagctgcttagaacactttttgaagaagtggcctaagctggagtgagggacaggacaagggcctggtggcagtacctgttggtacagacggtagaggaattggggaatatagtcttttggagttagacccaagcttcatgccttgggagatgttcgtgaaaggtttctgagtgccaaaactggggtggtaggggctggaggaccctggagggtctgtaaccactgaagaagaatcaagtaatcccaaggaaggagcctcgtgtgtttagctgtgtcaactggagtcaacaaattgtgtgtcagtttgcctatttggcttgaatagtgcttttcaaacttgtcaataggaccctcttttttaaaaaaaaatcagaatgttttactgagccctcatatgcaaaccaagcaaaagtggtactaacgggggcccaagtcctcccagtctccctttacccctcagcccccagacaccctcctgtggttgcttgagaactccaaggccctgaggagcacaggacaggcactgctgggatagcatatgcaccaggatacttcttacaccaggtggaccaggcgtgcagtctaagtgcctatgtgtggcacattggtgactcactgcagaagaactggggtagaggggaggagggtggggctgttgtttccctagggatgaagtccttgggtggtggcagcccttgaagtttctaggggtaactgggaggctgctctgagtgatttcgtcaccatgtcctggccaggttcctggcatgagtcactgagggccagggccatgcactgtcggggagactctgtaggggccacttccttggatgtggtttcaacatggcttcccctccttggaacccatggaattgcaagaggccaaaactctggatgaccctccctggtcacgtaactttggttcctttgaaggggcttcttctgtgtgcaaaggccaggggattggagctggctcagatatgtgagtagaaagttgtaaatggcccgattgacttctgttgcagtgagacttctcaaggatttccagggccctgttagagccgcacatgatgagggcagcctgggccttccttagtctttcacactgttctgggaggtgtttaatattgcggggatgccacgatgccatgggacagctggccatgcatagaggctgctgccagttgggccattcttccgtttgctgttctccagttattggagaaaggaattgctcccaatgtgggtgtgttgtggatggcgtattttgcccatttccacaaaggtgtgtttggaggctgctggatgcaattacaacagagtcagcaccttcttatggagtcaagggtttgtggggtgtatttggaggtttcctatccctaaggcagatgccctggctgcctgttccttttagtccttcaggagacatcaactgccccgacactgctttatgctgaccacagatgagctcccaaatgcacagcttcctcatctttaaagtagacacaacaatgcctggtttcaaattgtaaataagctaatatatgcaaaatgcccaccacagtgtccggtttataatatggattaaagaggtaatgactaaacactgaatctcttccctttgaatgccaaagccagtggccctgggtctttgtttttacccccttagaccttctggagttattctcctgcctgaagctgcctgtctttattttccaaacacatagcatctcttccttcctcataacccttgctgaggccctagccatgcttggagtcccttcactgccatgtctcagtttatctaagtcttccctgtccttgaaggctcagctaaaggcccacttcctttctgataacttcccagacttctatgtgctggggtggtcactcttcccttaacctacaggacacccaggctgcccctttcacttggcacctagccacgtgctgctaagaactccacataggtatagatatatatttttgcaaaatttgtatataacatgtatgtaggcacatacacacacacagagaaatgaggttgagtctttttattctctcttcccaaagcctaggtggctgccttgcacatagtaggtgcttaatgaatgcttattgattatgatgattgagttttatattagcttcctagggctgccacagcaaagcatgaaaaacgagatggcttcaataaccgaaagtattctgtcacggttctggagttcatatgtctgggatcaaggtgctggtggtgcctcctctgaaggctccagggggagaatttttctttgccgcttccagctgctggtagctcttggtaatccttgccttgtggcagcatcgctctgattttcacatggcattttcatgtgtctgtgtccagattttcccctttttatagggacaccaatagggcccagtctgatggctttctcttaacttgacctgctctccatataattcctaggtactggaggttaggactccagcatatctttttgggggacactcttcaacccataacaggttctttgaggaaatcaccttgaattatagtaacaactcagatgaattagctgtgggcttttatttgaatattgaacattaaaaatcattaataatatgggagggaggatgctgattagtttgtgggcacaaattacatgttgagaaattgataaatgtagaatataatgtttataaacaggctgaacattcaaattaaaattggtaatagttttgaaattaagtacctgttgttttcaaagaactctctgaatttatgtatccatattcttatccatagtcatgtgcaacagattcctatgtgtatatgcagggacacacacacacagacagaacccacaccagctattgcagacttagcatattgaatcagggcctcactgcacagttgaattttagggcatctgatctgagttgattctgcgtctttatgatggtaaagtcctttgcaaatagataaaatagcttgaggcagataccgttttaaatagctattaacatcccagctttggaggtgtccttcagtgacctgttgtttttaaagaagctgttttctctctagatctttgagaatgctgagtgagagagagagcagatgcgtgggtatggatgtagagttgggaactttcataacccaataaaatgttgaaaaggaggaagtccttgccagtaggttttatagtcctctttcctttaaaagccttggatgaataagcctgctgagttctcgtccttggcgtgactgtttatacaacctcgcgggctgttgccaagtgagcgagtgtgctgccatgattcagagcttcaggtgggggccgggctgccctttgtgacagcacaccagggactctgcgtgcccctcagagataacagcccctggaggatggggagagacctagagtttgagtcccggcttcctcatgaacccctgtggtggttgggccagtcaggtcatctctaggggtctttgctgcttcttctagcaaatagaaatgttagtctagagccagtgtttttccaaacattcctttattcacgttgataaatgtggaagttctattggtaaagcagtcaaggtgcagcgggtggagctgaaataagatcagggctatgttggctgcctccatcaggcccccaactcttcaccctacaaccttgtcagacacggaggaggagctgggaatagtgtctgaaaacccactggactatacaactcttttccatttttctaaccttctgagactttgtgattcactacccatgaagagaaaccaaggccactttgggggtgaatatttcgctgtcagagccactttgacaactgtaatgagaacagcaaaaagaccaagaagaaggtggacggacagacagactcattcagatagacatgtagagttgagtaggaacccatatactcaaaaatgtaaagaaaccacaccaccaatactagaaactcccagtatctactagtatgctattagcacactaggtgttttgtgtgttttattctgtgtattctttagactgcccactgaaattggtggtatgatccccattttagtgttaaggaccctgaagctctttaaagtacagaaaataactttcttaggggcacacagctagtagatagtggatttgcaattccaactcaggtctgtgacgggccatgttgccatgggaacattgacttgcgtgccttctcctatcagagaaactctgtttaggatatttacattttatcagtcaaggttaccgaaggtgtgtactatacccctgggttccagaaaagcagttcctgatttttttttctcccgtgtattcttcccttttccgcgggggttattaggcctaagcaactattgtctgcgttgaagctgtgtactagctgcacactagtctgcatggaagctgtgcactagcggtacgctagcactcctatcaggctgctatcattacaaatgccactctctttgggacttctgcttggctagaagctttccttttccttctcatcttaagctttgaaaatgatcttttctcctgagtttacttaggaaatgggcactattcagtctgtgagactgtcagaaataactaaattagttttattttttagaaacagggtctcactatgtcatccaggctggaaagcagtggctattcccaggtgcaatcatagcacacgattgccttgaacacctgggctcaagtattcctcctgtctcagcctctcaagtagctgggactacaggcatacaccactgcgcctggccaagtattttgataagccagaggtttcagtttttctgagaatatttatttcccaggctgtggaaaggccctttgggctcagaggtaatgttcatttttgtccaagaaagcaaaacagtgttaagtatgagtaatgacctgggccaaataatttgctgagatagatacacaggttgtacaagccagagcacattcccgaagtgccagcctctgcctgcaagatgggcagggaacccagtggctctgtgctcagcagtcccaggttagctgctgccctctggctggagaaaagaggtctgaagtaagaagttttggaaataacttggcttccagtctggaagtcacacgagtcacattatggcccttctcaaccatattggcagccaggatgtgtgaccagctgcccctcctggctggtggggcgggggactggctgtgttagtctgctattgtcagtttgatgcatgttgagctgcatttctgctcttatttcccctaagaatgctgattgaccaagggattttctttttttgcacagattaatcctcagtgtcaaggatgactgtatactccaaatattccatctttctttttcccttcaaaatgtatttatggagcatctatttatgctgggtaccagagatagagcagtgaataaggcagatgttgtccctggctttttggagcttgttgcattgtaggatcctatcttctcatttaagatttggacaatatcattggccttgttaacgcagactcttcaatggccagtaaatcccttaggagaggaatttaggctgagttagttttctgtagctgctctttctttctaaggcactggctgccagatgtatctttagggaggtcagccatagtatggggcctgtaggtagaatttatgctgtgagtactcacaggaaacagcttaatccagagattctgcgtatgtgttgggagtatggaatgccctttcagttaattttccttctttcctactttctttttattctacactttaattaagccttttattttctttttttttccgagacggagtctcgctctgtcgcccaggctggagtgcaatggtgcgatctcggctcactgcaagctccacctcccgggttcacaccattctcctgcctcagcctcccaagtagctgggactacaggcgcctgccaccacgcctggctaatttttttgtatttttattagagatggggtttcaccgtgttagccaggatggtctccatctcctgaccttgtgatccacctgcctcggcctcccaaagtgctgggattacaggcatgagccaccattcctggccaggccttttattttcaagcaaattctgtctagtattgtttcatgcccaggaggcttttaatagagtacattttttaaaatttgtttttttagtaccaagtagcattataaagaggcttttgatttttaatttaaatttaatttaatttaattttcttgagatagggtctttctctgtcgcccaggctggagtatagtagtatgatcacagcttactgtagcctcaacctcctgggctcaagcaatcttcccaccttagcctcccaagaagctgggactacaggcacacaccaccacatcaagctaatttttgcattttttgcagagatggatttttaccatgttgcccaggctggtctcaaatgcttggactcaagcaatctgcctgccttggcctcccaaagtgctgggattataagcatgagacaccgtgcctggccataaggaggttttaaaaaacttaattttggagagtttcaaacatacaaaatgagactggatcatgtaatgagtcattgatcctctctccagcaccagcaacctcaatacatggccaatcctgcctcatctacatccacgctgtataaggaaataaatatacatcatctgtatctcagcatgtttctctaaaagagactgtttcttaatatcatcataatgctcttctgcctaaaaatcaatacttttcttattgggaggtattttaaaggatacaagaggagagaaatttagccacaaacatcttgctcaacatatcagcttttttctttttttccccgtgttcagtttttgaccaaaagcatactgatattttataaaaatgatagccatctatgctcctagcagcttttctgggtatacatgttgtgaccggggtaaacattaactgtctgttcctccatctaagaagaataacaggtattcacttcatttggaccatatttatgtaccctgagtaattcccagacctctcccaacttctaaagttccctattcattcagcaagtatttattgagagactcattgcacgtcagtcactgttagatctgggaattacggtggaaaagaagacaaagtaggccctggacttgctgcaatttacagttgatagggaagcagggcttccccacacaaggatactgacatacaccaacagtcgctgggctgcagctgtggtgagtgtcgtggggaagtgctgtgagagtgaaccgagaagacctcaggggtctgaagggtcaggaaaggcgttcttgattcttgaggaagtgacatttcagcccagcagtgcagatcgagggaacagcatgtgtgactaccttgaaacaagaaggaggctggctcctaaaggaacagaagggaggcagtgaggcaggtgtggggttggggatgggcaggggaagtggaaagagccccccatcctgggcctgcctcttccaaatggccctgggacctgagagcaggctcttgggttcctacggctggagaccctgggatgctacatggagacgtgagttccagttgttctcctgactgtagcattgtagtgaaaaaagaactccaatttggaaagacataggcaggcacttgcaggctgttaccctggaagaagagaagtcatactatttacacagtagggtcattgtgaggattaaagaaaatatatattttattatatattatatgtaataaaatcacctgacaacaaatttcttccccctcctctttcttcagtaactttcttcttcacttttcctgtcagggaccatcagctccttgggctgcctcaggagtcctctcccctggtgtggctggtgctgatggccctgctccccagcgggtagagtcctggggccgtgcccttcctgggggcgttttatttagaccctgacatttacacaaatgttcaattcaaacataatgcttttttctttttgccaaaaaacattcaaagtctacaaaagaacataaaggaaaaagtgaaatctcattttcctgaggaaactgtcgttagagagctggattgcatccttctagatgttttacatacacaaacacacagtcttcaaacaaaaaatgaaaatttgaaatttatgatttttcactcagtgtatcttgatctctttctgtgtgtacaactttgagacctgggccactcgggagtgttccacagacttcattgttcctggcattgcttgtgttttccctgctccgtggcggcttcatctccctgcttgggccaggggcaggatcctctgtgtccggccacctgagttttcctgcaagccagtccacctctgaaagcctttgctttgcagaaatgcatttcaccaaagccttgtgttgtcattggcttgttttttaggaactgggtggagtctgtgactgaaagatcttgcttttgtttcctggtatttggggagtttcattagagcttttcctcttcctggttatatgtccagtaaattggggataagttaatgccagctcttgactctgctgcaagccatttaacagctcagttacccaaacttaagcacaaatgtaaggatagcatcagtgcctttggggcccagctgtaagggactcagggggaagcatttaccagaaacaagtacaaggaatcacagcttcttgcatcccatctcttcccaagtgtgggaagaagggcaagaagcaatggttgtagtattttcttactttttaaaaagattacattgaaacgaagcaaaacaaaacaaaaaacaagcaatatagaaaggtataaagaacaaggcaaaagtcaccctgatctctagcgcccctaccccatccatggttccttccttagagacctgtaagtttaatcatcatcacatagttttctagacctttctttgattttgcaaactttgaatgaatgggatcataaagtacttaaagtacataaagaacttactgttctgccacaatgaatgattttcaaatgcaaattaaagttttgtgtgttaaaaaatgctttgtgggccaggcaaggtggctcatgcttgtaatcccagcactttgggaggccaaagcaggcagatcacttgaggtcaggaatttgagaccagatggtgaaaccttgtctgtactaaaaatacaaaaattggctgggcgcagtggctcacgcctgtgatcccagcactttggggggccgaggtgggcggatcacaaggtcaagagctcgagaccatcctggccaacatgatgaaaccccgtctctactgaaaatacaaaaattagttgggcgtggtggcgcgcttctagtcccagctactcaggaggctgaggtaggagaattggttgaacccaggaggcggaggttgcagtgagccaagattgcgccgctgctctccaacctggcgagagagtgagactctgtctcaaaaacaaacaaacaaaatacaaaaatgagcccatgtggtggtatacacttgtaattccagctgacttggaagactgaggcaggagaatcacttgaaccagggaggtggaggttgcagtgagccacgatcacgccactacactgcagcctgggtgacagagtgagactccatctaaaaaaaaaagtgctttttttttttttttttttttttttgtgaatacatggcaagaatctctgtgtaaaggcagttgaaaagttagcaggacagcagaattacctttatggaatttgggtttctgtgctgtgggattgtcgaggtacctgggtcagccctagggaaaactgagagaaggtcagtttgtctgaagtctcagtccttgatcttggattttttcttacttctgtcccttccatgttgtggaggcacctactctgtccccctgcatctaaacatagcctgcagtatggggaggtgcttaatgtcagacagaatcacagagccaggcttgaatgtaggtgtgtgtccataagcaagttgcctaacgtctctgaacttcagttttctcagctatgaagtggaaaggacagaaaggacaattgctgtgtcatagagtggttgtgaacattaaatgtgattaggaatatttctagcctatagtaggttttcaacaaatcttaatttccccctttcctgcttgttaagccttcattctataaaggcgtgttaaggcttggacatgttactgtttctcaagggtatttgcatttcaacaatgaccaaaactttaactgaaggaattaagaaccagccaacaggactgggaggatccttttgggctgaagtcacaccacctcttcctggcttttcagaaatatttcatgaatggtcacaacaggttatgtactaacactacccccttttcttagaacttggccccaggaccagccctaccctcagaggacagtttggctgctagatgactgccagcctcaaccttgtgcattgtatttagtgatgaggttgaagtcatatggagaagctgggataaggggaaagacagcattattaagagcatgaggtttcaaatgcttgctcttcttactaggacaacgcaagtccgtctggtatctttgtgggaattactcttaggtgagtggacaggcccttatatacattagcaaacggtgctcttcctccggggtaaaagcagcccaagcctatgccaaatcaccttggtgaacagagactagatgggatttttgctccctccatctccactgccaggcaatgagtgctgggcacaatttgcataatcatacacagtgggcccgttattacaactgtgcatgaggcctaaagagtcattattctttttttcttttcctactttcttttagcttcttgacctgagcaatggagaacctaccaggaaacttcctcagggtgttgtttatggtgtggtgcgaagatcagatcaaaatcagcagaaagaaatggtggtgtatgggtggtccaccagtcagctgaaagaagagatgaactacatcaaagatgtgagccatttaagagtttttgccccccacctgtattctttttgtagcatgcaagagaatggagttggaagcattgaagtgaatgtaataaggcattttgaaagaattcttagtgttatcattttggctggaaatgtttctgtgtatcttcatggtaatgttaaagtacagatgtaaatctgcaaggaaggaaaggttgagcttctgctggatggatgttactaggtaagtatactcaggagagcagatggcttcctccttccgtgtagggtttggaggctcttgagtggtttttctttattgcacttaccagtcccacattcatccctggcaagaggaataggaagactgtgggtgattcagatcaatcagttgggttgaaacaaatgctaggaagtcaaccacaatagactttgtccaaccaagccaatcaatgccatttccttgtatttagtagtttatttcctatcttttaagttacatgttcttttgagaaaatttgggaaatataaacatgtatgaagaagaaaataaaatcactcataatctcactattcatccagagcaattgttaacattttggagtattttcttcttctctctctctccatttcttttcattccatcctgtgttcccctagattgactgattcccctcttgaccaaaccacccagcttatatggaagaggagatggcctgctctgacactgatgggctcacattacagaccagtggcttagaaagtgcttgtaagaggcagtgtaggggcagggagtcaacctaggcctgtgagctcacagaccttgcttcgagctccagctctgtgtctggcccagcaagtcacttttgctctgtgcaggcttcagtcctcatgttgagattgtgggggttggctgggctttgatacctaaggttaaaaacacagctttgtgagccccattttattttgtgggttttcagataagatgcaaactcatgatgtcttcgcttttgtgtgagtttttaaaaggaacatttcttgttgaatttaaaaaataataaatgcttagcagaaaatatgaggaaaagccagcaaaattagcacgcatatacataatgtatatgacagccaccaaccttaaactcctagttatcccacctttcaaacataattttaaaaatttattttattgtatattttcgagacagcgtctcactctgtcatccaggctggagtgcagtggcacaatcacagctcactgtggcgacacaatcacagcttattgcagcttctacttccccaccctcaagtgatcctcctgcctcagcttcccaagcagctgggactgcaggtgcgcaccgctacacccagataattttttgtagagacccagactggtctcaaactcctggacttaagtgaacctcccacctcagtttcccaaagttctgggattacaggtgtaaatcactgtgcccggcctccagacataatttttaaccattcagaatattcaattcctgaatttcctgttaagaatagctcagacattttaattttcttgtatttttttctcaaggaaatacatagaccttcctcacttaaatgctccggaggtatggctcctcccttagtaaccttctaaacagagtccagagtcccacattgcccaagacaaaggcaggaggagatgttggctaatcctgagctgtggatgacatgtaccaaagacatgtgccaaagacctggaattaccaccctccactgtgatccgcaacttaaaactaactttcaggtccctcctgccataggtggcttcagttccatccctggcctggtcattgcagtatttgcctttgggagggacatgcagctcaagattccacccactcaccactgggagcagcacaagagccagctcagggccacacatgaaagccgttctgcctgcctagaatgaaaagttgtacctttaacctcattttcccaaaatgtttgtacttcatggcaagaaagtagactctatttttagaattcatgtggggaagtctgggggtcttgactctcccttcccccaaatctccaccaatatccagtaacccctaataaacatgctgtctattttaaaacaatgtgcttcaaaattaagccttccaatactatgtcctaaacacttacattctaaccaaactgctatctttaggcccttcctaaaacagaaattctggagtgtgctggagaaaactcccttgagacttcctgccctatttgagggttcctgagtactttccccatcctagggataccagaagaagggaggagacagggactgtttgtaaggtcttttgttgtgttttgaaagtttttaaggtcctgctagccctctgaaagtagtactgtagagaaacttgaacagcgtttgtgtaaacaagtgtttttgggatcacttgaacttttgttatatttactgccttgcgtgttattggtgattactgaggaactgactttcaaatttatgggctccccagggttcatattttacttccttccattccagatatttgattgctctttggcagtcagggccgatagagggaaaattagaggttgctttttggtttctttggtcctcttagccatgagtctgttaaaacacattctacttgtaaaaacatgtgatgggaaaagggcaaaactttgcccaactgtcatttgagggtgataggtgaatttcaacaaaccattttttcttcagagtttatttggctaattaatatttattatgatagttacatgtaattatatataattttatgtaattaatatatattagcatatatttgatatattctatattaatatatgcctatatattttattatgtatataaaatatatacataataaaattatatatatataaattatttggataattcctaactagtttctaactagttgttgggggtgaccttctcccttaatttcctgtcttgttcttaagtttatttttatgtggggtccttctttctttttcttttttttttttttttgttttttgagatggagtcttgctctgtcacccaggctggagtgcagtggcatgatctcggctcactgcaagctccgcctgccggattcacgtaattcttctgcctcagcctcccgagtagctgggactacaggtgcccaccaccacaccccccaactaatttttgtatttttagtagagacggggtttcaccatgtcagccagggtggtctcgatctcctgaccttgtgatccgcctgcctcggcctcccaaagtgctgggattacaggcttgagccaccgcacctggccggggtccttctttctttagagtttcttaaaagttttagaaatcttgtatgaaaatgttatggcttgatctctaactagtatctttgtgggctacaggtgagagccactttggaaaaggtgagaaagcgaatgtatggagactatgatgagatgagacagaagattcgacagctcacccaggaactatcagtaagtcattatctcagttgcttggagatagggaggcatggcaggctcagagtggtccctcagtggctagtgcctaaagatattagagtatctagtgttctttatcaatagaattacattttaaataaactgagaaaattttatcacagaatgaaatttattacctaaagggaaatttttatggtaagaataatcgtattcatattcaaagcattctcaccaaagtcaggagcaaaacaaggaagccagctatcactattattatttaacattgttcttcacatactggccaaacaagagaaataaacatataggtttaaacatggcataggtagatgtaaaactatcactgtttacaaactatatgattgtatacctggaaagctcaagtgaacatgaaatgatgaaagaaaaactactacaaacaagtaaagaatttgttatttgtagcagggtataaaattttatacacacacacacagaggatataaaattaatatataatatacaaagaggtttcaatatacaaaaaattcccaaaatatcatcaacagaaaaatactacatacctaggagtcaactataataagtggaaagaaacaccatgtgcttagaaaggaagattcagcatcataagatccacattactgtaccattttaatatgacccaataaaaagaccaacaggttttgttttttataagtggagtaggtgattctaaggtttatatagaaaataaataaaaagattgggaaaataatgggaaaaaagagcaacgagagggagtagccttattaaatgttaaaagaaagtgaaaaagcctcagagattgaaacagtatcatagtggcacataaatagacaaacatcaataaaaagtactccagaaatgtacccctgtatatgataaatgtagcatctcaaaaaaggaaggaaaatggactagtcaatatgtgctattgggaaaacttatgtgctgttggaagtcttatacctggctaaattcctaaagtatcaaagatttaaatgtgaaaaataaaacccaaaagtgccagaagaaaaatatgtgtgaattcatttatacccttgaggtaagggaatgccttttcttattatgatataaaatcccaaaaccatgaaaagaaaggctgataactttgacaactttgaaatgagaaactcctgctggtaaaaatgtcaaagtcaaatgaccgggaaaaattatttgtccttcgtatcacacataataggctcattttctgaatattgaaagatcccccacgaatcaagaagaaaaaagctacaactcataaaaataggtgaaagatttgtaacaggtaatgtatactaaaggaaagatggagagagctcttttgtgtatgacaggatgctctgcctcacctcatcgtaagataaatgcgggttaaaaccatcccatgatataatttttatctattagacccgccaaagtgcaagagtgggtcaggacattgttcacaggcctgtgggcaaagaagagggttgctgatgaaaatgcaatttgctattactcttacagagaacaattcagcattatcgatcaaaattacagatgtttagatcctttgacccagcaattctattcctagcatttattctacaggtagactctcacatatgaggaaagacataaggatagatttatttattgtagcattgtttgtaatagtaaaacaattggaaacctaaatgtctatcaagtagaggaaagtggacaggcacggtggctcacgcttatgatcacagcattttgggaggccgaggcaggtggatcatttgaggtcaggagttcgagaccagcctggccaatgtggtgaaaccctgtctctactaaaaatacaaaaattagccgggcatggtggtgcaggcctgtaatcctagctactccgttggctgaggcaggagaatcacttgagcctgggaggtggaggttgcagtgagccaagactgtgccactgcactccagtctgggtgacagagtgagaccctgtttcaaaaaaaaaaaataagggaaagtaagataaacgatgtatctctacaatagaatatatgcagttgtaaattaaaaaaaaaaaaaagaaaaagcaagtaatcccttgaaggggagatacagaaagatgtagacggtgaaaaaaagcaagatgcaagaaaatatgtaggaaaaaattgctaccatttgtatagaacaggaagagaagataaacatatcaggattgttctgtgtgtgcacaaaaagttactaaaaggttaatccagaaagtaactaacaactgtttctaattgggaggcagggtggtaactgagcagggtggtaattttttataaaaatataaaagtaactttatacttttgaaatgtttgcaccatgtgagtgtattacctactgaaaaatttaagaaaaataaccttcttctagtttagccaagctaatgcttgtagacatttaaaaaaatttattattaatattcccaaagataaaagtccctgtctatgtgacgtaccttccataagagttaatatctgtgggaaagaagggcagttacaacagtcatgcatcagagttcaatttatggctgggctgtgagattaagtgcttaagtaacacctagtaccttgattataggagtggggctacgtaaatatatctccctaccccatttcttgattataggagtggggctatgtaaatttatctacctagccccttccttgattataggaatggggctgtataaacatatctacccagcccattcccactggcatgtgggaggacatttgtgaaattctcacctgcttatggaaagtcattctgccatgactgtcagacaccaatgactgtcatcaaagccaaagaattggatttgcaatagatgcataaacaagactctgctcctcgctttccatcaccatctcctacacaccctcattttctcatgctagaattgtcccagaaaccctgtctctctgcctactggtctcctccttctccaagtcatcctacctactgcagccagattaagattgctaaattattgctattgaaacacactgctgaacacaaagctgccacatgctcctgggcctggcttgctgcttcaattctgtctccactccccagagtgcacctcctgctctgctgtgccggggctgctttctgctgctcccagaggccacatggggggccttccaccctcagtcctaactgtatctagcctcttaccaatatctaggtcaagaatggcttctgactcagacatgttaaacacacacacccaacaaagacagcagcaacaacagcagcaacaaaacaactctttttttttttttttaaatgagacggagtttcgctgttgtcacccaggctggagtgcaatggcgccatctcagctcactgcaaccttggctcactgcaacctcagcctccggggttcaagcgattcgcctgcctcagccttccacgaagctgggattacaagcgtgcgtcaccatgcctggctaatttttgtatttttagtagagatggagtttcaccacgttggccaggctggtctcgaactcttgacctcaggtgatccgaccgcctcggcctcccacagtgctgggattacaaaaacactcttgagaattgagtgagaccaaagcatattctctccatggtgactacaaagaacaaggtggctgcagaagttatttcaactgggttctagttctaggagcgccacttctgagctgtttgacagtgagcaaatcacataacttctctgattgttttcttccttacaaaggacaacattctgactcctgcacagtgttgttgagagggctaaatgagggtctgtgagtaaacactatccaaaggaaggtgattcttgcccttctctctggatcatgcagatgttgacttttaatttaaagctttactttagatattgttgaagtagatgtggcttctaacagaagaaagttccagcctaactgaagattgtcgtgaacgtgtagggattgattttgtgtgactgtctcctcgatctgtccaggtttcccatgctcagcaggagtatctggagaatcacatccaaacccagtcgtctgccctggatcgttttaatgccatgaactcagccttggcatcagattccattggcctgcaagtactcatctgcttactgctatgacagggcaacccagcttaatcaagagtggggactgtgcctttgcagaaaaataagtcacagaacatccttagctcatgattcagaattctttaagcagaaccactgtgaagactgtgcccagaagacagtgtaggaaactgaaggaagcatttccaagctgagactctaaggctttgtttttgctctctgaaaaggaaatttagaccccgagtttagtgtgagagatgttgcttgcttcaccagatacccgagtggtcctcagcatcagtgcctaaccccacacgtcagccctcttcctccagtcccagtgccacaggaagtgccacctaatcacagaataacacagacttcactaaggacaatctgtactccttcatggcaagcaatataaaaaaggcctgtaaacacttttttataattagaaattattttgtatcagaaagaatcatggatattccacgtcttgtagtagcagacagggaaacagaaagacccggtatcttatatttgtgaaaatgcatgttgttatctcactttgaggcattgttttcttggttgatttggtttacaggagctaacccttcaagtgcttcccattcttactcttacaagtcccctaacatgcaaattaatttgaaaatgttcaaagcaaagcattgtatgtatttgaaatagcttcccttggtcttcatttccaaatgtatgaacaacagtttttacctctcctccaaatttatttggctcttatctttttatcctcctctcaaaagttccaaaacctatttcaaatcctttctggttctatataagtaattttagataaataaattttcatgttgggattctccacttcccctaattctctgataacagttggtatggcagcagtgacaacagcagggctcggccactgtcctggagtgggtctgggtggcctcgtgtttggggtcatctgcgatgcccatttctggtggggcttctgagtcccacccttttcctggctctcttgagtgtatgccagctttcccctggcctcaggccaagccccactgggtctggtttgctcagcagcctttgttttcccttcctcctgtggtcgggggggcttgccaaggctccctttcctcccctttcggacgctgtctcattcccagcccaccagcaagggctttatctcacctgagttcagacttagtcggtatttgtactacatctctggtttttcttcccagaaagaaaaatatatttgccagtattttctggcaattcttgtgctttgccatctggccaacactctggcatttactgcagaggtcagctgtttgagctgggccagctctgacccaggcaccttgactgattcctagttatcatgcaggctcttagtcctggacagccaaaggagccttatagctaaaaccgctgagagaaacagaaagagagagacaaagagagagggagagggagggggagggggagggggaggggaggggaagggggaggaggaggaggaggagaaggagaaggagaagccatctcacagcaggaaactcaacctggtagaggaagagggctgatgcacggtgttaggcactgatgctgaggaccactcgagtacctggtggaccgagtctgaagagagctggcttcttccttatgcaagaccccagcctcttccactggcccactctgtccactttcattattattgacagggagaccagacccttggtttgattccatagaatgtcagagctagaaagaactgagaggatctcagttttatgaatagacaaactgaggccgacagagagaaatgacatgagcaagatgcctacctagtgacagagccaggattagaaaaatcctggtctcttggaccagagtgtaggtttttgtgtggatacacgagtagaatctgtgaagccagtggggctgggggagtgggtggctggtctaggtggtttctaaagccccttgaagctcaaatgttctgtgactccatgcttccaaatagcttcagtattttctttagtatctaatcacctccttcagaaattctttttcttgattcaagtaggtttaggagtgaaaggcttatattgtccaaagtagaggctgaggaattgaggaagcttcagagactgatcatctagacaagagcacagaggtgttagaaacagtgcccaacaccagggttttcacatcttctaatgtgaaattgtagatgactggggacacagtagaagatgactttccaacggcacagattctgtggaggccatttatctctaaggagagttaaccaagtagaaaccaaagcagtaaatagcaccaccatttttttctttttcttttttattatttttttagagatggggtcttgctctgttgcgcaggctggagtgcagcagtgtgatatagttcactgcagccttgacctcctaggctcaagtgatcctcatgcctcagcctcctgggtagctggggctacaggtacacacaaccatgtctagctggtttttaaattttttttgtagttgcccaggctagtcttgaactccaggctcaggtgctcctcccacctcagcctcccaaagtgctgggattacagtcatgagccatcacgcatggccaacactattgatttaaacatccttgcttcagtgcggcctggagcaaaaattacttgtgcggcttggagcaaaaatcacttgtctgcattaccaaattctgttccttagtacttctttattactacccttctctgcctaagggaggaaggtgaaatgtttgcaggtatgtgagtattctcagtcacattgtcactatcctggcaggcagtctagaagcgcagaagggatagctcttttaagaaaaaagggaggccgggcgtggtggctcacgcctgtaatcccagcactttgggaggccgagtcaggtggatcacgaggtcaggagttcgagaccagcctggccaatacggtgaaaccccatctccactaaaaatacaaaaattagccaggcgtggtggcaggcgcctgtagtcccagctactcgggaggctgaggcaggagaatcgcttgaacctgggaggcagaggttgcagtgagccgagatcgtgccactgcactccagtctgggcgacagagtaaggctctgtctcaaaaacaaaaaaaaaaaaaaaaaaagaaaaagaataaaaagaggaatatctctattctataaagctcgtattttgttttctgatttcattgtggcaatttgggaaatacagaaaaaataaataagaaaatagatacccatagccctatcacatagtgaaaactatcattcagatttcctcctggtctttttccccccagtgcataaacatatatttgaaccaatgcttatacatatttttcaaaatgggattatactatacttactattttcaaaagctgttttttttcccatgtgaaatgatgtattataatacttttccttggaaggactccattttaatccatttccatccatcctaagcagtggcaagtggtgttggcagcagctatgggatggtatgggagaggttttcagtccctccaagctacaggggcagacctcttggccaccatgggagacccacagtccctcacagcacagggtcccagactggcagttgctgtagcctaggacagctaccccagtgcttaatgataaggggatgccccagcatgtggtgcagcccatgtgttttcacgccaccggatctggttttgtttttattttcatcctcacagaaaaccctcgtggatgtgactttggaaaacagcaacattaaggatcaaatcagaaatctgcagcagacgtatgaagcatccatggacaagctgagggaaaagcagaggcagttggaggtagcgcaagttgaaaaccagctgctaaaaatgaaggtggagtataaaagcctagatttattttctatgaacttttctcctctttacttctcccttttctcttcccatcttcaacctttccatttccttttctccattctcttcttcattggatttttttttttttttgagacagagtctcactctgtcacccaggctggagtgcagtggtacaatcatggctcactgcaacctccgcctcctgggttcaagcaattctcgtgcctcagcctcctgagtagctggaattacaggcacgtgccaccttgcccagtaatttttgtatttttagtagagaaggggtttcaccatgttggccaggctggtctcgaactcctgacctcaggtgatccgcctgccttggcctcccaaagtgctgggatgacaggcgtgagccaccgtgcttggcccagtttggggcttctccataaatgcccccattgggcatgcctttcttggcctccagtcccttcaagggctctttagacactcaccatggtgctgttgttatgtaactgagaagacgcttgggatgcccacagatctgggacgtcagaagccttggagatctcttccttcactgtttagattttctttgaggtcccaaggcctttctgtttggcttgacaataaagagctgaggggcacacaaatagctggtacttgggctgtaccccaagtacaatattctcaagaagaaaattggtgggtgactagggacactggggaatgtcccatttggccccctaggctgggagcattccttagctgaacttctaatgccctagaggcattagtgcccctcccaaatttaaactgtggatagacttcctacccggtgacaggagcagatccatgaatggctcctggagggcacttaataaattatatcttggatgaattcctttttatgtaagtctgtggtttgaaaattttgctcagcacagacttaggctatcttatgagtagcgtatccacatagtttattgctcaaagcagaatatgtgagggagtgaaaggtggtactattggtaatttagttagggagacaaactgggaagtgtgggccccttcacaggggtaggctgggtggggaagaggggctgccggtccaccgcccggtctctgtattgccgccctggggatctgctgccagttcacttggcctgccacagccatgggacagatcatctcctctgtatgttcacttctaatagggcagctcttcttttccgtgtaagagttactttctcagtaagagttacttggggggtgaaaaaagtttatgttgctaaaaaagcctgaaattactgatttaagtaatttttttcagcttaggggatttattcaatcattcagtccacaaatatttattgagtgtctactctatgtgtgtgtcctgttcagtcctgttggttccagaggtggcctgtcaccaggcatctggggacatcattaggctgcttggcaatctggctgcttccctggagtccaggcctttaactccagcccacagttgcctgttttagagactgatgcttgttttcatcctgacagtggagttaaaaaggtttctcctactcctcctattttactccccaaattgggaaaaaaaaaaaaagcttcaggaactcagggtatgttacatgacctggatgcagagtgaatgggcctccagggacagagcccttccagcaagctgtgcgtgcactgcaaatggagcacacagcacacagggtctctctcagctggtcataagctctgctcaggactttccactttggaacttcttggtgccaacacttacccagtgatgagaagggagaagtcaagggcgtcaagagagacttgtcacatcttggaaataacatcatgtaacctattgagtttgaagaatgcttcccttttccagagtttaggtatgcagcaaactcagctctctgcaataggcgataacctggaaggaggggatgagagcaaaccttctgcagcataaaatcaatggcgggaagtctgtgtgtgagaacgtggcctggcaaacaggaggcaccagccaccaccaacctaagccctgcccacctgcaactccactgactttttctcacctcctaagccaggcctgcttcagtactaggggtgccagcttagtgttccccatgctaggttggaatgtttccaaaagcaacatttaggaaagcacaagggtatggaaagggtgagtccagatttctcctttgagcttagctggtcttacctagaaactggcttggccaatgcaactgatgagattgcgtagagaaataagtttctaccttttgaaaaagtcactcatgtggagcatacctttgtcctgagaatgcccccaaaattcgtgtgaaatgccacttttatttttctgtggctctgctcacccctcttcctccctttccctgttaggtcttgctgtgtctctctgctgcagaacccagtggatgggctcactacctctgtgagtccccacatgaaatgtgcagtggaagctgccaattcctctgggccctgcaaaagctgtcgttctgaaatgagtctcgttgtaggtggaatcgtcccaagaagccaatgctgaggtgatgcgagagatgaccaagaagctgtacagccagtatgaggagaagctgcaggaagaacagaggaagcacagtgctgagaaggaggctcttttggtgtgtgtgttgtagctgccgatgtaaacttaccgggaattgttggttcattattgttggtgatgtatacgtagtagtgtttattcttagaggtgggtcagtagactcagccatgggtaagggatcaaggaattattcatctgctcattcactcccctcccctcttcccctctgcctttattcatccccgtctctactcagaatagccccttgtctctgtctctaaatacacacctttttctagctcatctgacaatttgccagcatctaagcaaaccctgggcttgcccgcagctgtgccctccctccctccatttggttctctctacctgaaatttcctccttccctatctttgatcttgcctaagctccctaaaagccttaaatgccactctctccatgcctggagtctcttccagtcatggagccagaaccattatctgtccttaggaagctcactcactctctctctgcttttactttggaattcttttatacctgccattagagtggggctgtgcgtctcacatcttggcttttccaggagattataagttcctgaaggcggggactccatgtctggctcatctgtgtccgtagaggcttaatacatgttctgatgattgactgggttttcttgttagtaatgagctgatgtattgcattatgggagaaggatctgggaattctgcattcaattccagatctggttctaattcccttacacttctggcaaatacagtgacattctgagcatctactcaatgttattaaacatttgtaggcctcttttacaccttttggatataaagacttaagggaaaaaagggaaaaaaatgtagtgaggcccattaaccagccacatgatgtatctttattcataggtgagaaccagaaccgtgaggttgagttcatgatctgtgagacactttcaggttccaaggtcatgttttaaagagaaatcgtgatctagcaaggcctgagctgattggatcccggtgagtagcctcggtactccatgcctgtacttaggagggtatatttcttttgcaggaagaaaccaatagttttctgaaagcgattgaagaagccaataaaaagatgcaagcagcagagatcagcctagaggagaaagaccagaggatcggggagctggacaggctgattgagcgcatggaaaaggtaggacacagcgttgggcctattgcccacttgcccaaacttttccctgtaggtccatctgagatacgagaggccctggatatggattcctctcacctccaaaatttgcaattaaaaaaaaaaagacaaagctataaaataaagtataaggaagtccaacaacgttctcatttttcccatgataactattttgatgcttttaaaaaatattacttgtgaaattctttagaaaaattaatattttagcagccttgctttgctggtgccccaggtgtgaacttagtttatccattgaattatcaagccctatttaggtgttacatcaacacagcagccctgttgtttctggggcatgtgtctcaagggttggcttttccttgacacgctggggacttgagagagtagggaggccccatttctctaggtgttgtaagcaggctggtgagtgtggtgggggaacctgaggaaggcgggagctcagctgggataatgaagcctgtctagtgaaagggaagaggccaggaattaagtaggaagtggaggaaggggaggaagtggtgggagaaaggaaagaggaaaagaaggaagagaaggaagagaaaggatgggtgacctttagcaggtgacggctgacttctggacccaggagttcagggccaagtctgtggctggtttctgggaatggctccctggctgcatatgagtttgcagagagcagtgacctgccaagaccctgacattattagcaccctgtgactcattcgggatgccaagaatctccaatctgatgatggaggcagaggtggggcagcaagagcaaggtcactgtcaggcttcatgtgatgctgagaagaggtcgccttagctaatggtgtttgcagcataagcccctgtactgtcccctcataaggcgaggtgtcgccactatgggaactgcatgaaattcagttctgtggagcttcagagctcactgggtgcttcgttttagctctttagctttttacttgggagagacttgggcaaactaaagagtcaattacaatctcccttctaccccctgggaaaacagaatcccatcttttattgaagagtaggtgattggcttagtcaggactaacattagtattgaccagagggggtggtggtgaagattgggcaacaagggagctttctagagcttgagtgagcttcctcccacattattgtcctcctacaacagcagaagatcccagttaactcagatgctctctctctgggcagcaggtttttctgcagcgtaaagaagcaaggtgagccggcagcatagcagggtggtctgggggagatgccgtcatacagagaaaccacaggtagtggtcatgaacataggctttagaatcagacagtctggggatttgaatcttgtgtctctttgtagttgtttgcacttacttggtttttcctaactcagtctccacttctgtaaaatgctgataatggtacttcttattcttagggcttttgtgagcaataaatgagaaaaatccacgccaagtgctaagcatggttcctcgtatatagtaagggttcgatcatttgtggctatgatttttactctgttacgaggttgcctaaatgtctaccctcagagtcaggttgtctttagcacgacccattttatgcttatcttcattgctgtcttgaggttctgaaagtttcttgtctttccccactgattttcacatggagccctcatgtgggatgaatgggtagagccaggaagctggtaaggccagccctccctgccagcatttaggaaacacaaaaccttccccaagtggtgttggcttcttctttagtgattggaaatgtattgtcctttctctaaatcttcctttccatttaggctagagaaatgctctatttattgaactaacattaggtaggccaatttacactgtttccttttcagggataaatctgtgagagcaggaatctggccaaatcgctgtctcacactacgtgaacggcatgtcctaggcagggctgtggcagtgtacgtatcctgctctcagttttggattttgctcaaggacaaaccatgtgcttttgaatggcttctctgccatatgccttagtttactgtttctcttgctgagcactgtatttcaaacacctttttttctgatcagtaaaaatcttttaaggagtgttctctaccagggacccttctggggaacagataatagtctatgccataatctgggcagtggtttcacaggtgtttacaaatgtaagaaataattgtgcagtgtacacttaagatttattgtacctcaatttaaaacaaattttaaaagtgtgctgtaagttagaccttgctctactttatgacagcctttttctttcttgttttttgttttttttttctttttggagggaggcattcacttgtgaaagcttttatcactgttatttcggggctaatgtaaaacttccaaccacataggggcaggaggaatgttctgctcaggccaggccataagaatgtgcatttgctgtagagatttaaaaacagtaacaaaaccccagtcaaagttgatctacctttgttattttaaatatttcagagataatatattcttcctgcttaaggtggactgcttccccacccctttggcctacctcttggtataccactgcttatagcttcagaagttgtggcagttaaattttcaaagatttgcttttaataatttggtagaaaagaggtttggaatctatgtagctagtaagagtttgctgggtggaatttccgaacataaagatgaggaacattagttcttagagaaggacctaaagtaaaataatctcccaattagtgagcgttatttgataaacttgcattttaaggaaatttgttacactaacatctgtaatgtatttttagcacaatttcggttatgacaggcaccatgtttttatgaacatttttcagctttgtccaaagaaatgattccagactcttttttgggcaaacttctaaatatacatatatatagcaaagtgtacaaagtgcacggcttagtgcgcgtatgtttcctattgctaccatagcaaatttccacaaggttagtggcttaaaacaacacaaatgtattatgttccattcctagaggtcagaagtgctaaaatccaggtgttggcagagctggattccttttggaagctctagaagggaatgcatttccctgccttctctaacttctggaggccacctgtactcctcaacttgtggccccctcctgcagcttcagaggcagtagcagagcatcttccaggctccttctctctgattctaaccctgctgcctcctcctccttagaagggcccaactggataacccaggatctccccattttaagatctttaacttaatcacatctgcagaattcctttctccatgtaagataacacataggattcaggaatcaggacatggacatctttggagggccatgaatctgaccacaacatatttttacaagtgaatacacctgtgtaaacaccacaagttagaatataggatattgccagaatcccagagcctcttttcttgatgattcagaaaataataaagaattttgcagtatcacaagccaccagtttaaagtattgataatcagtatttggggctataaattttcactgatcctgggctgatggaatactttggaaaatgaatcttgaatggttttatttaggatgttttgtctctgacccataaatatatctataaatacacaacaacagacttggcagttttgagccttgtttgggctttgctgagcaggtgtgtaaaacccagggggtgtcatatagacttggactccctagtgctagaattgctaaatagacattctctgtcaaacttgggatccattgattaaaatatcagtttctgtttgttttaggaacgtcatcaactgcaacttcaactcctagaacatgaaacagaaatgtctggggagttaactgattctgacaaggaaaggtaagacgtaatgcctttcgtcttgtaatggatttaggttgtggacacgctgtgtttttatgacctcatttgacccttacattttcatttgtgtggttgtaccttattacagacttaagcatacataacattgggctgagagtttccaatatggaacaagtttctttggaagcctccagccacatcctgcagatcatggctggttgttagtgtagtggaacacatcaaatactttcacaagtgcaaaagtttggtctattaatgttctccatggccttgaactccacaggatacaccttgttgatgagaaaactcatcagctgtgactaataccacttgctttggaaaccaatttaaaacatctttctttgtttccaaactttgcttagtaaaaccttgcattatcctctggcagtgagtatataaagccctacatgaaaaacacggaatagtacgctgtctgttctagaaatcaaaatgcagagaggccattcaggggtctctagtgaaggaaaacaaggttgagatgatttgagtgttttgggcaagtgacttaacctccctgagtcttgcttgtgccacatggaaattcatctttaaacgggggagacgggtatgacggtgataacagtgcccatctcactaggttactgttgttaagagaactattgggcttgctgcctgccaaatagtacgtgctgaaaaaatacccatttttccttcctcatttgcaatttcagagttttcaaagttacaggaggcttgctagtcattaacatagtgctgaggcagagatggggcacgggaactagaccaccagacctttcctccagtgcccagccccagcggccccagagaactgaagagtccaagcaatgttggagaataaattgtgctgttgtaaaacaaaagtatgaaatgttttgtgatgtggcttgctctgtttggatgtagagaaggtctttcaacttgtcccacatttgccaaaaataaaggatatgtagagcaactgtgattccagaccttttggtattctgccgttgatttcagatattttattgtgttgctggaccccttcttccccgtcctcccctccaagtaatttactggatgttccaatatgttaataaccccaaaacagagagcttctcagatctgtaaatggtgcaaaaaaattatctctcagcccctggaaaataatcatccttatatgggataaaacttgcaaatgggaacttgaaaaatagtcctgtgctcctctgttgtggtagtttgttagtaatcacactactttgtgtggtcatcacataaagtaagaagaatggatcttagagtttgatttcttgttcttggaagcatttttaaatgtttttaaatttacgtttatttttttaccaaaccttccccaaaagatacatgttttctatttttatttatttattttttttttttgtggagatgagggtctcagcatattgcccaggctggtctcaaactcctggcctcaagcagtcctcctgccttggcctcttgaagtgttgggattacaggcatgagccgccatgcttggcgctcttggcaatattctttaaagctgtgactgttgctactgctgttgctgctttggtttaggactcatttgcttttttctcctatttgtgttaggtatcagcagttggaggaggcatcagccagcctccgtgagcggatcagacacctagatgacatggtgcattgccagcagaagaaagtcaagcagatggtcgaggaggtaagcatctgcaaaaggtcacaggcctgggattgcttcctgtggtggggaagcatccccagaacaagtctgccttgcccctccatttcctgtggctcacaagccgaggtgctcaggccactgccatctaggcccagagtgggatttccccacatgtcccccatggactgatgacgatgatgcccctaaaagaggggtttcctcaggtcaaagggttacagttaagaaagctggaaagtgcagttcataagctcacccactgtgaaaggacagtgatagcctgagtgggtacccacagctcaggggacccaagggggtgatgggcagggtgaatttagcccaggtccctgcactgcctccacagccgtctgtctgtctctctctctctctctcagctaccattcttgtcctttatcgttttctgggtgtgtctttcattccctttccttgtctgtttctctcttttttctccctccttcctcgttctcttctcccactcctgcttcttcttccttttcctttgccaccatcctttctctcctaactgtctctgtaacaggaaaccaagctatacatttactgtttgggcatagtttactattctcttttttctaaatgagaaaacgggtaagttgaacatttctatttctctaagaggaacaaaatttgttttaacttgtgtcaatataatccgcctctcttgtggtgatgttccaaagaagaaagtccgtgctctgtaaagctaatcacatattattgtagttttcttcttgctcaattaaaaaatccgattgaaaaatctgatagaaaaagagcagttagtactaacagggttataagaattcccttgagtctaattctctaacctgcaaagaaaaaaaaaggtttcaatttaatcaaacatttggttggcagtggaaaaatgaaaacacattttccttatattaagtactactttaaaaagttatgttttattaatgaattattaaaattaaaagcatatctacttctaagaaataattcatgtacatgacagacaaatggaagattaaaatatatctattttattaatctctaagatattggggatattaatgttggggagttaaggtcagagaattgtgagtatgggaagggacatctttttttattgtgtgtaggataaacatacacattagataaaagtttgtccgcaaatgagaagtgcagttatactgtgttgaatcatgtacatcttatattggttcacacacaagtttctggggagcagtggaatagcagaggaggccacgcacgcatctttgcaatcgttttgtgcatccaggcaggagcactgcccataacagtaatgcggagggagatcctgccctatcgtcaacactaggtagatgtcaggagtgtattttccaaggaaaagcatcactttgccacagttagcatctcagtgagccttggccgtcggggcatagtttttctgcttttgaatttcacacgcacgaagtctggggcaagggcatcccttattttcccctatgcgagtctctaactgtgagcactacatttctcccacctcaccacaggggggtgtctgtgtcattcttgtatctaatcgttagagaactattgaacaaaacctcatactggttggcttctgattcacttaaacccttacctgtaagaggttaaggctgtaccagaatcagagacattgtttttttaaaagacattttcaaagaagtttagaattctctgtttcctaacttacttccagaatataacaaacctaccaatttgaagagagtgaaggagtacacatacgtacacacatatacatatgtgcatatgtatatgtgtatttatacatgtgtatacatatgtatatgtgtgtgtgtagggatgcatataaagatcactgtccatgctttgcttttttctacctgtgatttcatatcttccagataagcttctctaagctttgatgtggtctgtggtctggaaggcccagtcgttggaaagaaatcaccagctaaaatttaggatgccatcagagttagcaccccctaggggctggctgggtttccacagtgaatgtagaccaccaccaccaccagcaacaaaaagagagagagacactttttattcctaataatttttactgcctgatttagaaagtttgtgtttgcccagcatactacattaacttacataagaaaaaaaggatagcctagaatctcatttgctatagccatttatgtgaatattttttttaaaagttagaaacatggtcaaggggcatggacaggtgagcaccttcagaagagcaagaccaggttggaaaggagttgagaacctgagtaattcagggaactggggaagacatgcccaaggagagatgggagctgaattcacatcttagaaaacatgagggaatatgtctttgttttgtattgtgaagcaaggccaggccagaaccactgggtgacactttcaaagaggcaaattgcagctcttcattcacaacaaagaaaacatttctaatactggctgcactggtaaggcatttagctcttcatcatggttacgttctttacaaagtaagaagttgatttagaagttctctagtgttcctccacaaattctgtgttctgtaaccttaaagactgtgtggaggaagtctggtaacttcagttaagtgttcatcatataaagaattctctattgtttactatgctgtgcctgtttttgtgagctcagccttatcattatgttgcataatgagcaaaatcagcaaagtcgtaactaaatcacttcagatcacttggagcaaattttgaaaaatccggagtactgaattggtcacttgtgaaatgaatcttgaactctgactctagaagagaagtatgttttcatctgtgaactccggctccccaggcatataggcagcctttaagtgtagcggatgttaaggaccctttttcttccctcacatgggtctggaagctcgtcttcatcatagcctcactttcaccatggatggaagtctcgtctccatccattgttggtatcattttggccataatgtccatgaggaaacttagtttttttaaatgatgggcttcttttgtttagctcaaaatgtccaggtgtcactactgcgatccttgggaatccttaaatgttaagcaacatgtttcttctcaccttagtggagtatcattttatcatagtaataataaataataaaaagtaactggcccaggttttgtcatccttagctcattaatgacttgatttccatggtgggagacagtaggacttgtactatgtaggaagggctcatggtgggggtgagcccttttgaaatgaaggattagtatatatcttacggtgtcaaggtcattgagaaaagataatgcaaaacgttttctgtgaaatgtggaaccaagtccctctcactaggctagggctttctactgaattaagtctcctgtcatggatgtcagggggttgggtatctcccccatcactagttcttccagctgattctggctttgataaaaatgagagaacaaagccaaaaaagccccacgtgtgcctcttatagccggaaaatatagaaaaatgccgagggattggaaagaaaaagccctcaaggggaaattaattcattcatccattcagcagatacccaccagcacccgctccgtgctggggctgggtacacagtggggagtcaagcagacatgggccgtgctggcacggatcttacccactggtgtcacccgagttccagggtagtcttgcctttgggttttattatcctgttgaaaagctttgttgggattggtctttggtcctgaatcaagctgcattctttagattgccaggaaaggcactgggagagctgggaggagtgtaaaaagtaagagagcatcctgaggcccccacagtgcccctctgctcacacatctttgagtgtgacttcttcagtccacagagtcattcacaccctctttacctgctctcaccatggctctcctgctgccaaccaaagcagctctcctgccaaggggaaagtgatcttaaggaaaaaatcaactatttgccttccaagagggtgggtttacatttttgccaatgggcagggatattgtttagctgaataaacagtaatttcttaagaggttttttttttgttttttttttttttaagctatatcccagtgcagccattaggcatcctttcattttgtcatgtctttcttttgatttccctttgccatttgtgatataggaaatgtttcttccaacagggtctgaagggagtttcttttcatttgcagaggaggcattttctttagacttcttttgctgaaagcaattacactctaccccactttgctataattgagatgtttaataagtgcaaaggtgcaaggaattgattttctcattagtgcttctccacccaagctacacattggaatcacctggggagctttaagacatgcctgaacctggcagatgggatggaggcagactgagcattgggttttgtttcgttttaaaaactctgcaagtgattctaatatacagccaggattgagaatcgctgtcccggattctcagagcggtggcctgactctccttgctgggtttcatgttcatgcatttggccagcatccctcagaagctcctatgcctgaggtgggaagctgctggtgaactcaataggaagggctcaacagaaagcaagccagggagacagtcaccagggaccaggagcacagaagtgagaaagctggtccaagtctgtgactctctgggcactgtcaggggaccttcacttcttgccagcccctggtcctgggaggattctgtgacagctcactctttttttattttttattttgttttagagacaaagtcttgccctgttgctcaggctggagtgcagtggtgcaatcataccttcctgcagcctccaactcctgggctcaagtgatcctccccactcaacctcccaagtagatcgactataggcacgtgcacccatgcccagctaatttttgtattactgttattattattattattttttatagagacagggtttcactatgttgttcagctggtcttccaactcctggcctctagcaatcttcccatcttggcctctcagagtgttgggattacaggcgtgagccactacacctggcctgacagcctaatcttaatagctgtactggcctggtggtatccagataatacaaacttcccaaaggctatttagacccatctagagagatgttactaaggtgggaagaggtacgcttgttaaatagataatagaaacttaaagggacagaatccaatccacctaagtccttgaaagctggactaccactaagagagactaagggtgattctcatggatcctcttccaactgtgcatgtatgcacgtgtctgcctcgccctgctttaaattattcacttctgtctgtacagaagacgttacacttggccacatggtacccctttagaaagagaaggcaaaaacatcttggttaaataattatattagcaatgaccacttctcaaattcaaggcaaagcagaatattatttgtgattcctaaggaatgattttgaaagtatttaacggtcatctcttagattttttttaaagagtgatgctgtagtcataatgcagcagttccttgggggaaacaaactggatcagggagaataacagatgagtaagaactcttcagagagttgagactttgagtatctggctctctagccagttggccaaacaaggctttacattactagtccctaaatccacatgcatctgcagttagagacctttatgtgtctacaacaaaagatggcctagaaaaatagcaacaagtatggactttagcatcagacaaacctgcctttgaaaagttattagtttccttgtctataaaatagggttaataatagtatctacccaattttttgtaagagttaaatgagatgacatgtataaaatgcacagcatgttaattggatcataagaaataataaatattagtggctgttattattaccacctgtaaatgggttcggctgtgtatacctaaagttaagtgaactaaaagcaaaagtagctattgttgatttcctgagcaatgcacggggctgccctttatctttccctttgggagtcttgttggccacattcaatctttgggtatacttctctcttctcttttgtgctctgtgctgttttctagcttagccatcaatctcttcacaagaatatttatacaaaaagcgatttttaagatttaaatttgcttcatcgcaagtatctgccatttttacatggttcagtcatttgctggcacacaatttaattcaaaactgttgtgtggtgtgctgaaatgtgcaacacacgaaagtacattttactaaatgccctgtgtttagaggatttcaagtacttctcataattggtaattagccaaatgggggtaggggaaaggagccatagcaccaagcccacaaacctaatccactcaattgaactgtctccagatcatgtcgcacgagctcttctccagatttagtctccggctctttggaagatgataagttggtagcctgctctgggttggaagcgattcctttattgttcgtgattagaagaacacttgtacactctctgctgggaagaggtggtatttatctatgatgagccaatgaacaaaacaggaaggacatattatttaaaggaaaatttgaccatgtggggctcttgtttgtgaaaacacccacatactgtcaccctgacttgtacagcctcaaactgcagagtcaagagaactcacagatccacagagtatttttaggaacttgagtagacattgaagaaggaactgcaatgaaaaaggctactgaaaaaccattcagaaagatccaggtggaggcttggaagatgaatccttacttatggaaaagctgccaaagacatctgctaaggagatgggaagagagcttgaagaatgttagtgctctgggaaggaggtgctcccaccagatcacccccaagaaagtacaggagcagccaggtatccatgtggtttggttctatttgtatatgggaggtggccctgaaggtgtccttcctgaatggatatcaatactcatcttaggactcttctaagaggagtttagcttgcttctatcaccatcagcattttgcctgaattggttcaaccaacttcacgaaaaggagtgtatctgataaagagaaatctatctggctgaaatatgttgaactgaaacatccttcatgtatgttttatttttatagaggtctttcttgagattgctgcaggcattggtgttttatcagaacatggcagttttgctgagaactagcagtagtagctgcagtcatagcaatgggtggcatgagtctacataagctgggagatggggctcgtggagtgagtgcgttcagaggcccagtgtccctcagacgttggctagttctccactcctatcactccttcatggcaaagcaggcatgaagctgctttcttgctaatatttgcctttgctttcatttagatgcttctacccagcttaagcaaggagggaggggatgggaaagaagcagatgaatacttttccgcattagttattaaccattaatattgttcacctgtgcacggtgctgtgtttagacacagatccccagatacgatgctgggtattcagacttccactagggagacagaggcagatttgagaatctcatctggatgttagcttagtgttgttacctacactgttttttagggacgcctttattgctgtaatgtttttctaagtctctggtggaaaagtcactggcatttgttctagcagcattgattcattgccaagttttaaaaaaggaaataattaagagaatgcaatgacctttagagaaaacaggtcacccatgtaagtcctgctttcagggtggtgtgctttcttctgcttttagagtttcttttctcttttgggctatgaaccgtacctggaggccaggcaggccttattctggagcagatagtgagtgaggttcctagagtactgcatagcctgagagtgcctcctaagtggatgccctccacacctcctgcacttggccctggccctgggtcctaggctcattgttgatcttcttagatctgggttccttgcattgcaggacctacctcagcctgctcttgtctgcctttgctgatgcccctcaattcacctctttcctgcctgtactgtgatatggtgtgaacttgacttatactgcttgtgaaacctgagtcatgtgctgaaatcctgccccgccaccgctttcctcccttaactggatccttagccttggactccaaggctacagctctgtctcgtggccactcaagccccacccaaaggaggtgctactcaaaagtttgaggcaggagtgatttattgtgaatgacaatgttatagtttctaattctagtgtttagcatggtattattccttatttattttaaaatcttagacaatttatctaaaatgtcaatttttagaaggtatcagcacaattgtggcagccttttttctgtatgtgttatatgtattatttaaaaaagcaggttcattctatgacaggtattggtttcggtattcacaatataaattgtcttttcaagggaaaggatattttctttggaaatgtcattgaatctatgttctctttattgaaattgttctaattgactttgaactgtttctcagacacctggtgcccagtttctggccatagaaactatgtgaggctgagtaattcatgttttgggtcactaccagtcacgaatgcttctctcattccaaggctatgcatatggatgtcacattcccatgtcaatcatctctggaaggtattattcgcccagttttttaagcatgggaaactgaggcttagagtcttaaaaaataagtagctggcagtctctcagcaaataatgatggtgctgcactacagacccagatctgtgactccaaagtcagcctttgttcttttcttcttgttacttttaattggaaaaaaatttaaattgcaaaaagttgtagagtgataaaaacaaaaatccacgaatgctcttctaggattaacaaatgttgccattttggcacacttgtttctgtttttttttttttttttaaagaaaagaacacatcacagataaagaagaggttctctttttacctgtccctgattctgttccttttccttctttcaccctctcttcttctcagaggcagtttggtctctaggccatgccttgatgattttactgtgtatatatatatataaaattagtatgtggcttagtttgtgttttaaattttacgtaaattttaatttataatattaaaaataaattgtattgtacatattttgcaacttatttctcagttttgtttctgctgttattccacatagatctggattattcatttcaatggctaatatccttttatttgaatatattgtaacttatttatcctattgatagacatttttattcttttacaaacaataccaacatgtctccaggcttctctaactaggaagtatacgtaaaggaggaattgctagggcatgggattggcataatttcaccttttctagatattgcccaatcgctgcccacagtgcacatacctttccaccagtcacatgtgagagggcagattttccaaatgctcatcaccacttggcactgtgtggactataattttggccagttaggaaatggcatctcattgttttcatcttaatttgcgtcagcctgattactcattgaaacttgtgaggttgagaaacttttcttaagcttattggccattcaagtttcctcctttatgaaatggttgttcatgtcatttgctcatttttatattagattgtttttcttttttccagctgacttgtaggaactctacatcttatcaatattaatcatttatcgaaaactatttgggtgccattatcttctcctagtcaatgttttttgtttgtgatatcttttataatatataagtttttaatgttggcagaagtaaagttaatctttttggctgtgttgtgtgtcttgtttgatgtaaagatagtttctgtaatagttttgcagtttgattgttcatctttaggtcttcaattacaacctgcacatccatcccctctatcctctttcttactctgtttttctccatagcacttatcatccaataatatgtcatgcactttatttatctgttttgcatatatattttgtctgttacctgtttccttccactagaatgtaagtcccatgagggcagggacttgcatctattttgtttgtggttgtatctctaacacctgggatagtcactggcaaatgatagttgctcaataaatatttgttggacaaataatgatccatgtagaatttatttttgtgtatcatatgaataggactccttttatttttggctcacggaaagcttgtttctctaatagcattgccgtactgatttttttcacgtcgctttcgtcaagctggagttgtttcccctgtgccattgtctttgaacaatcctgttttcctgcccctctgctgaagactgaaggaaactcattccttgggcttaagagtgggaataaggatgaggaggagccaggtacaatttatggggagcttatgggacagttggtacacgtttaagaagagcctcttatgagcatgagtgcaaaaatggacatgagttcctgctctcagaggaccttctggctgacatttaaactcatttgaacttgaggcagaatgtcataggtgctggaaacacagaagctgggaaacttagtggttaagttcataggctttgagtaaattcagtctgcttttgcatcctgcctctgctactgactaggctttgtatcttgagcaaattatccaagattcagtttccttatcaataatatgggaatggtcataacattacctcctcaagtggtagttatgaggattgactgatgtgatgtgtgctaaatgcttagcatagttcctgccaggacaaactaattctgatgtgggtggagagtctttagggaggaggtagtgtttgaccaggccttgtaggatgggttggatttttctaggcagggattgaatgggtggacatgtcagacaagatatagaataaataaaagcaaaaacatgcagaccagaaagtatagggtgagttcacagagcattcatctagtttggatggtacgagggagtgagaaatgaagaggctagaaatataggttgacaccaattgtgatggtttattagcaccaagccaagaaggatgtccttcatcactctgctcataattcctcaatggctccccattgcctgatcagatatgagctccagagtggtggctctggccagtgggtgctgggtgaataggaggggagaggagcacggaggacagcaagaaggctccaaggagagccctggctagtgctagagagtgtttactttccatgcacttgaactttaggaagcgcttccaaaatgcaattttttagcatcagctttgtgccagatgtggagctaggggcttccatatatatgtattacatgaatttgaagcagttcactcccttggacactcctgttcaggatttggtgttttgtctctgaaactgaattcatcgagaaaagcacaggggtaaataagcttcatccccatctccattccatctgcctcctcttgaatcatagagggaaaaaaaggacagcctaaagaattagggccccagcagatcctttgtgacagaagatatcacatgtcaaccttcctcccagccctgccaactctccaggccagctttgcagccataggttgtcatcactgggaggatggaagcaagcaaacctctgaacagggtgtggtgtgaataggacagcctgggccttgccctcacagatgcttacttgggtcgtaatatcagccctatcagcatccagatgattgtgaagggagtgaatgaatgatgaaagtcttggcacctcagtttcatggtctggtggggataaccacatagggttgtttctgagaatcgtgagctaagccagcaaagttcctggtagcttgcatgctcctcctttcttccttctcagagaatgtgctcagattgggaagcagtttaaccgtccttccctgacatttgtacagccaagtcatgtttaggtacccgggggagccagagtgctcctcctctccttctggagaagttgggttatctttaatataagatagaaatcaaaccaaattacattattttacctcagaaccccgttgcaaccgatccttttgaatggtatagttctattattatatattacttcaaacttaataggaaaaaattgattaaaatatgtgccatgttcatatctagcctggctgaatgccacaagacacattaattgaaaatgaatttccacaaacccaatcaagcatcatgaagatgaaaaatgtacctttttccctccattccttcattgatttttcattttccccactcagtgcttcatttagcaatttttcagtttcgttttgttgtggccttaattcatttcctttactcccccccaaatgagataatgtaccattttcttcatgcttattaaactcttctttcatgctgcattagtgcagggcagattctgatcttgtcatatttctctatgcattattttttttgttaaaaataggctgagcttttttctttttattcttacattttgtggtggcttttatcaaagagaatggactttaaaaaatacagtaactatgaaattacgatgttacaggacttccaaaatagaattaaggaatgctatgcaaaaataaaacactttttctgaggaagagtgtaaaatatcaattattctcatagtcacagtgggtatgtggggaccagacacaattcctcttttgttaagagaattggaaacaatggtttaccagatcatagagggatcaagaggctgggttaaagacacagcactgtcaggaaaagagcaggcagagggagacgacggctgaagcccaagtgagctctagaaggttctgtccctgacccagtcagttcaccatttccctggatttctaggggttttgaaaacaataatggggatcttcaaagtatttccttgtaaaattttcaaattttcaaataacgtgatggcataaatttcccctgaaaaggctgtaagaactcacaataaagtatcatattcctctcttttgacctagaattcatagccctagtaatctcgttttgattagatgctttgattggcagttatacatctttgataacattttcaatgtgaaatgaattattctttcgttaaagccattttaagcagaatgtctataaatgagggcccacgagaaggaataacaaagcaggggtgttggggatggtggctggggagctttggtgtatttattaacctgtggttgagttttgcgatgtgtgcaagtacacacagccccgacactctgattttgaaaacaatgaaatgaaaatgaaatgaaaacattataaagaaatttcaaataaaataatttaaaatgtttattgcaggggaagtttatgccattacattatttgaaaatttgacaatttcgcaaggaaacagcttgaagttccccatagaaatccagggaaatggtgaactgactaggtcagggatggaattttctagagctcactcaggcttcattcatttaaaatgaaaacaaaataaaacaaattttaaataaaataaacaataatgtcaaataaatgttcaaataaaataaacttaatgtggatttaaaatactgaattccattttccttataagatttaaacagtttgattaaatgtgaccatcagttttgtttttcgttttctgtttttaaagagtttatttgagcaggcagcaccaggccacatgcaattgagggcttcacctagggggcttgaggggaaaacttttataggtgtttatggaagcaagacaaggaaaatatttgattggttaaagcagaaagtccctacttaggccacacctgtaatcccagcacttcgggaggctgaggcaagaggattgcttgaggctgggggtttgaaaacagcctaagtaacatagcgagaccctgtctctacaaaaaattaaaaaattagccaggcatagttgatcacacctgtaatcctagctacttgggaggctgagatgggaggacccattgagcccaggagtttgaggctgccgtgagctatgattgtagcactatgctacagcctgggttacagaggcaaacgctgtcaaaaaaaaaaaaaaaaaaaaaaaaaaaaaagtccctatttagaggttagaggttagttggtgttttctgattggttaaatttaaatttcattttcctaagctgtgaccattcattctgacatgggtttcagtttgcttaggtcagaacccaaggcactggagccacctcagcctaatggcctcccaattaattattttaatggttcccctcttttggctagcctttcatttgtgagagattgatcaagttttagtgtgacatcttctgttaccatcatggctggttttcctttgtttcagcgggaaactcctaagtgtgacgtcagttttaacctacctcctattatcagtaagagggggcaggagggggagttgattctacacatgacactcccagtacataatcaaagtgatgtgcaccttttatatgctctgtattggtgtgtttcctgttttacataaggcatttttcgtgtttgttatcctttgccagctggtgaaagaaaataccccaaagcacaatttcttaacagcccatgtcaagcgctgtctggtatttaatacttatttgctgctgtgttttcttcattaatttctctccaagttcaatacggagttatgtttcatgagtcttgcacaattgagtgctactcacatgactacaatgctacagccatctcattttctgtcctctgatgtgaaatggactgtgtcctacatgttactaatgggaagaaattccaggaagttgagaagcctcacaacttccagctgtggattcctcactgaatccataacagaaccatactacatttttgtacaatttcactttggtctggttgacgtataagctcttttcaaaacatattggggggactttttttttttttagctatagcaatctgtttctaacgcagtttttatttaaatgtgcagattggcaagggtgatttcagctcctgagagaagttatcttttatatgagataattgatgcactaaacacttgttccctgtgggtttggggtctagtacaagggaaaaaagtcaactaaggatggcagtaactatgatgtgtcctaacaggggtaggttcaaaggctgagctatcacagagaagggggacacaaaggcagcctggaggacttggaaagcgctggcctaggtgactgtgggtagattgtgacagcagcagtttttctggtggaaaaggggatggagggtggggaggcattcctaatggagccaccagcctgtgtgttcaaagtcctggaggcgggaccatagtgtgttcatgcagtgctgagaggatggagtgtcctaaatatagggttcattgtagggacaggatgggcatgaaatgaaagtgggaaaatagggagcacagcggaagggcctcccgtgccatgctagtgagttcgaacattaaaagcgtagggggtttttaattgggagagtgagatagtctgcattcctggtaccagagcacctgtattttgtaaaagctccctccatgggtttccagcgtgtggctatggttaaggatgattacttagctcaaaccacctatgcaggtaactcgattgtagctaatgtgaaaaaaaaaagccatgatcagttttaagaaactaaaagaacttttatttcccctccctccttaaatatcaaactggcctgtattctaagagactaacatcctgcatgattgatcgggctgcaaggcccatattcacatattcagtctgagttacaaagaaacatactcatcaaaagaaaaattagaaaaaattctattaacatcagttaaaaggtcccagattttatgaaagtgtatttttccccttgttctataaggaggcctactgttttgtatttaaatttagctgttgcaagattctgttcttgtataaatcaaataggtgaggtccagaaaatgagtgcttctaatttctcagttcttaatgccctggtttgagtttggtaacttgcgtcatttaccaccacctggtgacagctagaactaaatgcagctttgtgaagggtaaattgaaggtcaaactttaacatttaatgcatcaagaagtgagatcaaaggtgcctaatggatttcttgcataccagctatatggtaacctggattttggagtagctcctgatttgggggttgctctggggacatgtgtttagcaagatcatcttggcccaactgggcctccaagcatctgatccagacagttttccccctgaagtctatgggatggattgtttaggaatggctggatggatttgttgattcattcatttgttatctgagaatataaagatgatcaaagtctttactcttgggaaactcacagcctagggaaggagaaacatcagtaatcatataataatagctaccttttgagtgtttatcatgtgctaggtgctacaagagacaatatttcaaggttctttgaagttagtagtcagaaacaataccagccacacaagtgtgtgacttaaagtttgtaaaaaatgaaccaaaggcttgagagtcagatgttcctaggaggctatcaaacccaggagcatgtgagtctatttattttagaagctgagtgcgtcacttgggaaagggatgggaggttcttcggggcagaccactggggagactaagttgggattcaaggttggcaccccttggggccggcagtgcactgactctgccagccttagcatccttagtgctcttatctgaacaagtcaattcagatcacagaatatactagaaaagaagtttctgtaagaaatgttccaggataaaagcaaatctgcacagatagcattaattcagcacaatagcatacttgtttcttggagcaccattgctgaaaaccatgagccttgttagaagctgccgcaccctcaaatcctactcctgtccagctccttctccccagaaccaagtgtctctccagactagcatcagccctctgctctctcatgagaagtctagagaccttctctctatagcactctctctaggtgatgtattaaccattcactgatttattttttaaactaccatctaggggacagtgaccagtaggatcctctcaatatcttactatgagctgctcattaaggtgttttaaaaccacctctcttgctttccttgcctcacaagccactctgatttcttcagagacagtgaaacgagtgtatttgaaatcactttttacatcatttgattaaatattacccctgactttcttggaagcttttagttccattttgcctttcatttaaagattttaaaagttaactttaacaatcttaatactataaaaaggaatgaaaaagacataccgtgagagtaatttttgggaactatttctacaaaaatggaaggaagtttacacaaaacaaactttaaccctaccacaaccccagaagtattgcatttatccaacttctcttccagcttttactttcatcattgtaaacttttgcttttctatcccttgaggctttttgtaaactttccattttgcagtatatttgtttttagtgtttgtgtagtatactccatgaaattgatatttcataatttattaccctttcctttagtgctagacattaaggttatttagtgctagacattaatagtccatattaatggaaataaccttatttctctctattataaataatgggagcaagaacatctttatatatagagctttttcctatgtttgaattatatccttaggataaattcccaggagtgggattagtggatcaaagggtatgaacagctttatggctcttaatatttattgctaaattgcctgaagggtcatactaattcacaatgccacctgcaacacaggagaggagctgcccctcccagtcctgccaacgctcatttcttcagtcaatagttttgggcaaatttaataggtagtcaagggtaaccattgctgtttttaattggtgatgtctttaactattattaacattggacattttttcttacgggtgtttctgttctattttgtatggtttacttttcatgtcaaaggattacattttttgacaccatgtgaaatttaaaatacttgataatgaaaatgccaaatgcacacagaacagagagagtaattgatggagccctctacgttacccaggttcagcaaatagcaagatttggccatacttgctttatctactccttcctcttttttcccctcttgtgcagtattttaaagcaaatcccagacattctgcatatgtttcctatacacttcaccgtgcatctctgaacatatggactttttcttacataattataacactatcatcacacctaacaaaattaatgataattccttgctattatttaataccaacctgcaataacattttccaaagtgtcttttcttctgatgctttgttccaatcagcatacactgtgtttacatttagttatgtttctaaagtctcctaatctagagcattgctgccccatctctcccgactacttttattcgtacctaagaactgagtcagttgtcttgtaaaaatgttcacattctggattcgactttttgtgtccgtgttagctctagaagcttgattagatcaagtttcaccttttcggaaaggcaagaacacttcatgggtgatgctgtgtgtttcatcgtgtatcacttctggggtgtataatgcctggttattccaccttgggtgatgccaaggctgataatggagtcaagtggtgacaacccaaaacatgattgaatgttttttcattagcttttaccatcatggtttaatctactgatgatggatgcttgaagccattatttcatagaaattgcaaaattgtgattttctaattctgtcattccttggccattgattaactggaattattctgtcaagtaaaactagggctttttagagtctcaaaatgcagtttgaacagagaaggcaagacagatgctttattttttcctccaaactcctttccaagtaaggagttgatgccttttttacatccattggagtccagtgagctgttactgttttattctaaagacatataatagtcatgttctttaatatctttatatttcatgtgttttactcaattacactcattattatttttgatgttcagaatgttccatccttggcccaaggggagacacctcatgtccttgttttcaggcataacaaggtatctcacgttcatctagtttatttttttgtcccctgaaatgagccattccaccaagatgtcctgtgtttttttagtggggaatgctatttagagaccacaatctgcacatgttatgttcttattgtttccaagttttctcagtagatagtgtagagatacatattttacaaaagaaaataaaaattatgaattcatactgatattgtcattttaaattgaacaaaattttgtttacttctttgatttcacacttgtattgctttctcttacagtaaaaatcttggttccaaacatgatgataccacaatatacatcaaacggtttcaaaataacttcagtgttactgctaacaatcttctcagtgaatgagagattactttgcagctctatttatctttaataatccactaagaatattgagtcaaattactgtattctaataacacttggattaatacttctcaccaatttgatatacatcgtttcttcaattcagtttgttctcagattttagggttcactttttttctttttggcttcattttattttttgaatctgtaaaatatgctttcaaagttaaacctatgtaacaaggcttatgtttattacataaacctatgtaataacttatgttatcctgtctccttcacctaagttcttccctttccctattggtagctatttattaataattagggttcattttgtctttgcagtgtttcttttgcaaatacatgtgcattcatgtgtccccacctgttttacatcaaagcgagtatactgtctaccttgccatacacttcatcagtgtttttgagatctgcattttttggaaggttacacagacctccatcataccatgcatggtttaaccagtcgcttattgatggagttctgttttgtgtttcctaaaataacacatatcctttgttcatatcatttcatattttggccagtgtatctttggtatctattcctaaaaatggaattgctgagtcaaagggttaatgcatatgtactttttctagatactgctatattcgcttccataggaatagtgtcattttgcatgagaaggattttaaaatttgttttgttttcagacagggtctcactttgtcacccaggctagggtgcagtggcatcatcatagctgacttccaccttgacctcctgggctcaagcaatcctcccacctcagcctcccaagtagctgggactacagggacacaccaccacacccagctaattttttgattttttgtagaggcagggtctcactatgttgcccaggctggtcttgaactcctaggctcaagcaatcctcctcccttggcctcccaaagtgctgggatcataggagtgaactactgtgctcggcctgagagtgattttttgaaataattttgtgagcacacaaatttaatatacaggatttttggaaagttaatgtgttattaatgatcctgcatactgttcccactattatgcataacacggcctggtacagagtactctggttcctgccttcagggaagctatggtttgtctagggagacatgatgtatgattggaaaacaaagagtagtctaagatagaatatattataaaaaacaaagatggatctttttaggaagcctttcttgcttactccaggccacatgagtcttcagtcctctgaatttcaacacttttaatgagacttctaatgatccttttttcaaaccaacttttgacacttggttgaacaaatatgaatgtattgaataacacagccaaatgtttgaaatgcaggctgccctgcaaattcaagccgaataatcattttttggagagttgtatctacatttcccaaagcatgttctctggaagatcttctggctgttttaaagggttacacagcaaaatcagtgtggaaatgttggattaatcaaagctgaggagctgtgactccagaatcatgtctgctgccccaagctcacctgttcacacaatccgcctgtcttggagcgtctcgcgttaatactgttccacgaaacacagagaatcagtatgcaggctgtttcaatgaaaaccatccagccccactggaaatgaggaaaaatagaaatagaaataaaaataaatgaaaaccaagggcatctattccagttgataaacctgtacttacacaattgtacatttttgattaacaattttccatccctttctttctagattgaatcattaaagaaaaagttgcaacagaaacagctcttaatactgcagcttttagaaaagatatctttcttagaaggagaggtaaggatctctgtttctttaagttggtgtcttccctaccattaaattttatgttgctaagcctaccaccgacacttaattaaaaatatggctatttcccggccttataaaattgattgagggttaagtgccagccttgaaaatgaggttctgacagctgtttttcctttaccatcggactcccctcattccagttgctgctgacttctgctttttggctctagtttttcttattaaagaatcatcctagcaagcctgataagctgttgattagcactgataattccccgcatttgtccagtgctttataatttgtgagatatgttcatatacattccttacattattctctctgcaactttaagaaaggcaagactaagattattatctctgtattaatacatgagaaaacagaggcacagagaagacaggtggttttgctcaaggttgcccagcttaataaatgtcagagccaggctgaaagactcctaaatccagtgctctcctgtcacagcgagtgaagatgtgttagaggggacttaattttacctgaaactttcagatgcttagtattcttgactttctggctttttgaaagtcatttggggattttgtatatgttccagagaagaatattatggggttggaagaactttacaaggagaagtcaaaatctatttgctctaaaggttctttattagagcttggcattgagcctttgccttttgagacttcctgaaaagctggtttgccaagcacctgtccttatctgtgttcctcgttatagtccttccacagtgagagagcccagcagacaatgataaagtaagaagaaagagaagagaaaactttgattaagccctgctgtgtgttgggcactgttagttactttggatatgttctgtgtaacacagaagttaagagtggaatccaacttacccaagtgtgaaccctggatctgcttcttatcagctgggtgatgtgggggaagtttcttatcattataaaggagggatcataactgtgctatgtgtgggtgacagtgaaatcagaatgtatagaaggtgcctggcatgtactaagcactcaataattttaaacgtattattgttgttccctctttattaaaagggacaccctctgagttagatgatattttcccccttttttagatagggaaactgaggttcgggggtattaagaagtctgcccaaggttacagtagagatgggtaagcctggatccagatcctgagctctgaaccaccatgtttgagtgggtggtgagctgagccttcttttactctgtttttgaggggttgccttacagcagtcataaccagaagtccctcatggcccataggggcctggcaccagattcaacgcccaagagtctctgtcttttgaagctgagtaaatgggtattttccccatttccactcctgtcttccctgccacagtcattggctcagtgccagccttgtgaatgaacatttctgtttctaagattcctttctgaaattgcagctccctgtgggaggaagcacaccttccccagtaagagtcagaaaatgagtgccctagtggaagcccatgtggccaaagagaaggcagtcacaggagagaggaaagacagactgacaggagaggcagaaggtcccccaagacagtgccccccacccccacctctggctgtgctgctaaagcaagctctcctactggtagattcttaaatgtccaagggaatattgcacatggggagtaatcttagaaatagctatgttggtttatgctcagtgtattaaactcatgtctcaccttagtttgggttgctccagcccttgaaatgtggagtccagatagtttatctgggaggcgatctcaggaagccccactaggggaatggggaaaatgagacagggaagggaagagagccaatagcggtgccatatcaaggaggttgccctgaggacagctgaggctcactcctgctggggatctctgggagatggtgtggaagtggccctgagctttccttactgaaaggccagaaagctggggcatttatccactaactcccatcagtcattagctgaggcctgctctggggggttgtggcagttctagcctgccctcggcagagccagttagactctggtggtcaaaggaagcccccagatgaagaatcaccagtggcctgttaggaaacaggaatgcccagaggatgtagcggggtgggtggcagtgtcagctatgtctatctaataagcaagactttgaaaaccagtttttttttgagcatatcaataatgattatcaatttgattgattaaattccctgaaactatttaaattccaatacaaatttattatgactaattgcttttggccacttcacacatccaccttaaatagcagacaatatatacaaaaaaagttgcataataacaagatttaataatacatttagacttaaacctattctaaaatactaaatatcatgggttttaatttattttgtcattgtttctgttcttgttttttttttttttaaaccttcctgaggccattgttttacttctttcaatattttcttagggctaacatcattttgacacctttcagacaggtgcagtcatctttgagatccaaaagagaaaggataccttctctaaattgctaagattagaggatgtgggttacataggttcttggttgggtcacaggaccctcagtggcttcttccaaggtgattcaaacacaggactccttatcactgtctttagcactattaaaaacttatgcattctttatcaatatttcatcatacatagctaggccatgtagagatctcctctcctagggaatcagaggtgacattcaaatacttggttttcctctttggctctcagactagctgatcatttacacacactctgccgacgctgttccttgctaattgtggatgatagctaatgctgacacgttgctgcccaactctccacttgattgctctacggcacggatgctaagcagtccttctccaggtcctgaagtcctggggtgacctaacttacatgttctttagttattctttctaacataacagaaaacttttaaatagatatctaattaatacctcctaaaagaaaccacaaaagttttggtagataaatctggtagctccccatcttactaataagtagctacatttgtgaagagtgcaattgcagactccagactcagactacctgagtacaaatctcagctctgccacttagtagtgatgtgatattgagcaagttaattaactgtcctatgccttagttggcttattggtaaataggaactctctctgtgaagtggcatcctctccatagagttgttatgatgattaaatatgttaatacttaagtgattagaaaagtacctggctcatggtaaatgccatatgtgttactgtttctttaattgcctgcgtcccagggactcttttattgtcattgataaatattttagatttatagctatgtcccataatgaatcactctttctcttttgctcatcctcaaagttggagactatcatcaaactcagctgtgtgataatttaacaaagagaatttcacctttaggtgaacatgagcagggattgtacaagccaggtcctactagcaggccatagggcccagcagtcctttgcctgcagcaacctgaaaggttcatcctgggagggtgaggctggacgtgagtcttataggctggcaatatttcagcttcttttagcagttggccccgatatttgcagaattcataggagtttgggattcatatcaagtcttagagtttaagtgtcataagctgatggtcttgtatgatgtcattactcctattatgtattctggctccatgcccaggcagtatttggggatttattgatcatgcctgtgctcctcttagccacagtgctgttggttttaaagaagcaacccttagtttcagattgaagagccttggctcttacacatgtcctcagttagtccagttcctagctgttccccaagaacactttagctgttctgcttcttgagctacgggttcaggactgcatgacatatccagcactgtgctggagctgcttcatactggttaatgaaagcggaagacatgcatcacttctcaggtctccatttggggatgtcatgttggtcgcttgcaattagctatggaggaggtcttgacaccacagaaattgacatatgtcacaatcagagctttttaacctagggattttattgtcaaaaatttactagtgcaccattagtgttatgtaactctgcagttatacctaagggctttgtgtttttaccctgacacctctgcttacaagcagagtaactctgggcaggtaattctacccctctgagcatcagtttcagcatttgtgaaatagggataatccctcccacttgaaagaaactttttatgattaaataatagatacaaaagacttagaattgtgcttggcacagtgcgaaagatggacaaatgttaattctttcttaattactcaaccttttggagacttcggttctgactcacattctgccattatctgtgcatgaccttgggcaaatcatgccaccaacaacctggactcggttagttcatctttaaaaaagggagaaggcttagatcaactctgagattattaccatttttaatgtttgaaaactttgttgaaatgttgaaatcgtattaggatcctagacagttaagggaacaccctctacctgatcctgggctcggagaaaaggacaggccctttcctaggtcatggctgacactctagaacccttcttcttttcttttaaaacagagaatatggattattttagtccctggattcatcatttgtgcttacctgggtttaaactcattagattttgaactccctcctccctctgccccaaatccaaatgacacagcagactcctaaaagcttgctctagcctggccctgtcagactacattttcatcaaccaatttaaaatcttcctgatcccgctgatgagtgagaacatgcggtgttcaggggacataaacatgggaacgataaacactggggattactagatgcgggaaagagggagggggaaaaggtctgaaaaaccacctactaggtactatgcttattacctgggtgatggcctcagtcataccccacacctcagcatcccacaatatacctttgtcaccaacctgcacatgtgccctctgattctaaaataaatgtgaaaaagaaaatcttcctgataacaaaaatatgcccattcttttttctttttctttttttcaaacaattttttttattagctcaacttctggagaagaagaaatattctccatttccaatatagaaaatgttcttaaaataacattgcaagcatttatcttcataagctttctgaaactctgaacagatttcgttacacttttctctgtcggatatactacacttacagctcaattcaaaagtcagaggaaaggagtcaaatgtcttggttttgtccatcctgcatttaatgtgtgttgtgtagcacctgagcctctcagtgtgtctgttatgcattcttgcgactattattaatttttctgtgtaatgttggagcggcagcaccaggcactcggctccccacatgcattttatggaacacacattcagtgtatgtgctacagcccccgagctgcccacacccctgggcctgaggggaatggtgggggaggtgaccgccaaacattcgtgacataatttccaaaaaatgtccagaagtgctgcacattttctcccttcgtgaaaggcacatgtgcctcccaagccattgggttggtattcgttacacatataaacacaagggggtggtgtttgaaagcaggaaaaccatggaatttgcttctcaatcccagaagcaatcttttttgtagcacagtccaggcagcagtctgaggctattctttgtcgttccactgtagtcatattctgcaagactaagaaggagatagtcttgatttattgtatcaaatcggttaatttaatttttaaagacttttcttaaatctgtcccacgctctctaactctcctcttactgcccatgttcaggctctcatcatcttttattttttaccttatcaacttagttatttattaacttacataaataagtttctgttatttattaacttacataagtaagtgtttctgtttaagcatataatccactgagttttgacagtgtttatacccatgaaataaccactacaatcaagatagagagaatttctatcaccccaccaaagattctgtttcagtttgcaacccagctttccattcatccctaggcaattcttgatcttttttttctgtagatggtgagtcactttttatcacttttggtcactatggatttccatttagtgggaatccactgtatgatttgcatttctagaaatggaatcatatagcatgccctcttctctgtccagcttctttcactcagcataatgatttgaggcgcatctaagttgtatgcattcccttttgttgcagagtggtattccattgtatgaatatatcgcagtttattcattcagctgacaaaatacatttgagttgtttccagctctgggctattgtgaataaagctgcagtgagcattagagtacaactcattatgtgaagatagttttagttcctcttgggtaaattcctggtagtggaatagctgggtcgtaaaaggaggtataagtttaactttttaagagaccgtcagtttttcaaaggggttgtagtattttaattttccagcagtttgagtgtaccagtgtctccatatcctaacccagacctagtattgccaaccttttaaatttagccattcagtgttatagcttttagaatttgtctagtaggttttctggctttgaaagctccaaaataaaaataaaaacaaaagaaaataaattgagccatgctaggggatatagagtgctgtctcatgtggttttaatgtgcatttccttgtcaactggtgatgctgagcatcttttcttcttttcgagaatcttttcatatgctttttgccatttataagtttcatcttttgaagtgtctgttccaatctttagtccgttgttttattgagcttttagttttcttactattgagttggaagagttctttatatattctggattcgagtcctttgtcagatgtatgtgctatgaacattttctcccatcctgtgacttacttttttgttttcttaatgatgtctgttgaagatatatatatatatatatatatttttttttttttgcaatggggtcttgcacagatacccaagctggagtacagtggtgcaatcttggctcaatgcagccttgacatcctgggcttaagttatctcctacctctcagcctcctgagtagctggcactgcaggtgcatgccaccacgctcggctaatttttgtatttttagtagagatggtttcaccacgttgcccgggctggtctcgaactcctgagctcaagtgatcagcccatgtcgggttcccaaagtactgggattataggcatgagccaccatgccaggccctgttgaagagattttttatttttggttttcaattaaccatttatttcttttatgatttttgtcttttgtgtcctgagaaatatttgcctactacaaggtcacaaatatgttctcctgtgatttcccctaagaattttatggtttttacttgtttatttagttgatccattttaagttgatttttgggttttgtgtgaagcaaaggtatcaatactctttttttctacacagatgcccagttgtttacttttaatgtctctttaatttctgatattatttgtaccctctttctctccctatcttatccactctgtgtctctgtctctctttctctttctcttctttaaccagatagtgggttatcaatttttgttgattttaaaaaataattaaaatagcttttggctttggtgattttctccattgcttgtctgctttctattttattgacttttgccctgatgttcattacttccttccttctaattatttcgggattactttgctcttctttttctagcttcttgaggtagaacttaggtcattgattttagacctttcttcttttttaatataaacctttaaagctataaatgtccttctaatctctgcttcacctgcatctcacaagctttgatatactttacttttattatcttccagttcaaaatatttcctaatttcccttgagatttttctttgatttatggattatttagaggcaggttatttaatttccaaatagttgaaatttttgttgatatttttatttctaatttaatacttttatagtcagagaacacagcttgtatggttttaacttttaatttattgggacttattttatggctcagcatatagtttcaattaaatttttgtgaaaaaatatatattttgctgttgtgtatatcctacaaataccagttgggtttaggtggttgataatattgtttagataactgacatttttcttggattttgtgtaattgtcctatcaattgccgagagaaaggtgttataatcccttaccatggttttagactgtctctttctttgtttttactttgtgtattttgaaactctgttactaggtatatacacatttttgttatgtcttgatgatgaattgatctttacaatatgaaatgttggtccctacctttgtcaatactctttgtcttgatatctattttaactgatatgaatgtagccatttttaccctgttatatttactgtttacgtgctatatattattccagccacttactttcaactgatttatatctctgtatttaaagtacatctcttatagaaaatagttgggacttgcttttttatacatagttatagtctctgccatttaattggagtatgtagtttactaatatttaattatatttatatgattggatttagagctaccatttcattatttgttttctgtttgttccttctggtttgttttgcttattttgcttgcttgtttgttttgttctcctttttgccttttggattatttcaattttttaaaaataccattttaagttatccattggcatttttgctgtgtctcttttctctaatatgttggtggttactctaggtattgtagtatacatcattagctgttcactgtgcacctagagataatattgtaccatttcttttaaaatgtagaagtcttgccatgatatacgttcatttaccgctgtgcctgtggttataattttatatgtattgtatctatatacattataaaaccatgatacatgattatcatttttgctttaacaatcatatgtactttaaagaaattaagagaaactagattctttcatatatactctatttctgaaggtctgagtttctctctgatgtcatctcgcctcagcctgaagaaattttatttagaattttgtgtagtgcaggccaggtggtaaaacattctcttagtttttcttatctgaaagtaaggtttttatttcgccttcattattgaaagatatagagctctaagttgccggtttatttctcttggtactcattgtttctgggttccatggtttttaatgaaatatctgtagtgattcaaatgattatgctcctgtatataacaggttgctttcaagatttttcttcatttgtggttttcagaagtttgactgtaatgtgtttctctttgaatttatcctgtttggggtttactgagcttcttgaatttgtaaatttatgtctttaactaaatttggggagttttcagctattatgttttacagtaattttctgctttagttttcctctcctctcttcctttgactaaaaaacccgtatgttaggcttttcaaattgcttcacagttccacagtgctccatttattgttttcagtcttttgtttatctactttcaattggataatttatattaatgtattgtaaaatttactgactttttcctttaccatcttcagtcttaagtccatctagtgacttttaaaaaaaaattcaggtattgtactttcctgttctaaaattttcatttagttcttttttgtattttctattttttttactacttcattaattgtaagcatatttttctttgtctgactgatcattgttatgatggctgcattaaagtctttgtctgaaaattccaacatcatagttacatcaggattggtgtctgttgattctcttttcccttaggagtgggtactattttcccgactctttatatgtcacataattttggattataagctggacattgtgagtgctttgttgggttcttgttttaaaaggcaatgaatttagccagacccaactacatcctgcctgtctgtgatgctgatggcagatctcagttcagttctttaaacattagctgcaaacttctttcagttttctccagacatgcatggttcagtggtctaccagagacttgaactgagtctgtatacaagaatttagtgttttcccccaactctgactctcctcttttgccttctcccctactgttagtagccctggcatccttctccgggtttcttcccccagaaagatgatctttctgttaatattttactttatctctactgccaccaccatgactgtgctgctctcagggcaaatctgccagcaaaaagaaaaataataaaacacggagaatatagagaactgcttgccacatgcttcaagtttcacctcatctccaaaacttgcctgtctttgttcacttctctagagatctcattagttgtttctaatctgttattcagaatgtacagctgtgagttgcagcaggatcagtgtgttgagtgcatactcctctcactgcaagtgcagcccccactctttagctgaataattgcagtggtcttcctgctgtctttagtcttattttcctccaatccagctttcacttgggagccaggtgattaaaataaattctggtgctgaccttgctattgtaagattgatttctaacttcttgtagtggcatacatagcctttcattaataacttctacacacctgtgtaatgcaataaggtgccttttctcaacccagtgtgtttccacagttctggaatactcatcacctttgatttttcttactctctttcccttgcctaactccagaaactccaccgctgtccccattttgagtcagatgtcccctctgagttccctcttaatattctgtggatccccctataatgttacttagcacatcgttctattatttgctgctcagttatctgtattcccccaagaccgagctcctcaagggttgcaaatcatgccatatttctttaacttctaactcttccctcacctaatttcactgcctgatatatagtagatatacaataatttttctactgattgcattatattctcatgagtatacattttttatttctgtttctatgggtgtctgttgtgcacacacagagttcccatgaaatagaacaaaggatttggggtcatttgtcctccattcactgtgtatcagttgcggcatatttgctaaccttgtcttttaggccccctacctataggtattagacccagcatgctgtgaaatccttatgattaaagtctttacactaagaagggataaggcgatggtattactggagtatccagcaaaggcaggcgtcttctgcctttctctttttttataaattggagagttcagacattgctggggaagctcactgtctctttctctctctctctctgtctgcacgtgtgcgcatgcgtgcatgcgtgtgtgtgtgtgtgtgtgtgtgtgtgtgtgtgtgtgtgtgtgtgtgtgtgtgtgaatgctgatgactctccgggaataagccagcactggggatgaggtgatagattcagaacccatcgatctgtcatagcatgtcatctactaaggaatctggaaagcattctcttcctttacaccatttcttatttatcagaaaggattcattgacttttacattgtacggaacatggattttcacaagaactgatacgttgctccttggtatcaacctttcagagcgggagctactgaatgtttaacccacatcctttctttcaaaacaaatgagcttctgtctccatagaacttttaaactttcttgtgttacctagtgtcttagaatagtgcctcagcttcagctccaacttaaagaagaaaagaacaaatggtttcatttctagttatgcaaataaactgctcattgtaaaatcatttataaatttatttatttagcaaatatttatcttgtatctgctgcatgccatgctttgagcatacaaccaggaagatagatatgatcactgcttcatgaacatttagtctagcgttactgaaaaatatatagaagcactttttaaaaagcatcccagaatctcaatacgcagacataaccactgttcacttctttctgaatattttttttttggcatttttgcccttcggatttcaggcaccagcacttcgtctattttcatttcagtatcttcaacttctttgtctattttcattttggtatctcttgcttctttgtccttcatttcccccatgaggcaaatctccaattgctgagcatctaatctttaacttatgtaatgtttggctctggcccgaaagaaaaaaaacttttcagaatgtgaattttaatcccaaggagcttgttctactttatatgtgtgagattctgaattttccacacctacgaaagactaattaagttatagaggtatttcccactgttaaattaaattaacagacttgctcattttatagtttaatgaggaggtgttaaaagttgggctgtaccttatttataatggcaaaaacgtgataaatatctaaatgcccatcaataagagactagttaaataaataatgtatccatagaatggaatactattaatgagttaaaatagtttgttgacataaaaagaaaactaatatagatggaaagatagctacaacaaattagtggctgaaaaagcagattataacatagattacaatattttgttttcatttatgtaaaattggatgcacatgtctgtacatgcatagcaagccatttgtatgcattcagtcaatctatttcttcaacaactattgtgtaagtgatgctctgtaaatacattgtgatagttgcccatgtcatggggcaaaatcagataatacatataaattgtatcatgcatatttgagggggaacatatttgacttactgaaagtacctttttttctcatctccagaataatgaactacaaagcaggttggactatttaacagaaacccaggccaagactgaagtggaaaccagagagataggagtgggctgtgatcttctacccaggtatttaggaatttcctgatttttttttttattcaaattcctctttggctgaagaaaatactttactaggctgttcttagcagaattgcattcttcctatcacaaatatttctgcaaagccgagtggtggctgctgagaggcttgactggtttctgtaggaacaggggcattgtgcagggtggaggggtcagcaaaggagagacctggggaagccatttagagagagatgggccctgtcagtgagtgaatgcatttgttccttccttccttccttcattcattcaactaatgctcttagtaccttccctgtgccagacagttatgacacagagaggagtgagatttggttcctgccccagagtacagtctggagggagagacaggtatgtaggtagacatatataacggtgtgagaggggcatccgaggtgctttagtgatatacaagagggaggatctaaaccttgaacaaaagtcatctgttcctcagtactgtaacagggtattgtcaagcactggatccagttcataaatacctgatctgcttgagtcatcggcagatatgtgataactataacctggtttgttcagttacattcctgagctagaggactgacctgttcattgttaagctgcttccatgcttgcgtctcttcctggtgacattagagcctgtaacacagtaacctgcctctgataactaactcaccattcccgggtgctcacaactgtgcctggcctcaagaggacataaaacaagtttacagcaaagatgctaatgacatgtgacttgtgatttaggtaatcaaagtcacaaaatgcctggtatcgtgtgtgcaggagggtggattcttgtgtgaacaggggcacttgtgtgtgctttgctggacatagtagtctagaaaaatgtcgaatcctggaatcttgagtggttacagctggtgggaagtagtgacgagccgatcaccaagctggggtgtggaatacctggttcttgtcctaccagccagcagcaggatgccttcagacaggttcttcactggggcctcggtttctcaacttctaaagtcagtgatttgactaggtaactgctcaggcctctaccagctctaacattgtacagtaaggcctcctttccttactttattaatttttatttattactggtattgtcatttttgttaattaaaatgaatcacttgccattctcaaagaatttaccaaaagcggcattaggttctttctttgacagtgtcctcaattacattgcttgccttctagtaaaaaggcattttttatcagtccaatataattaatagaaaatgttgaatatatatatatgtatatatatgtgtatatatatatatgtatatatatatatatatatatacatatatatacatatatatagactccggatctcatcatattcagatatattttcatatatgaaaatataaccaaaaagaacgatcaattgtgtacagagacctttttgaaatttaaataatttggccgtttcccccctttttgtatttttcaaaagccaagtggcctagtccactctaattgcccacataataaatcttgtttggctaagacgggtacaaaactatgtctgaaaccaataaattgtttgttttctaattcccgcattttggcttaaaacaagcttttcaatttgtatgcccaagtatagcctgaagcaaacttttatggctaagttatgaaaccacaaagcggttttcataatggaagtgctgacagacccttaacttatggccatggtgaacttggaagccacttcagtatctaaaagcagcttttccataaatgtaacatttggtttccccccggatccatcttagcagtttaactacctaggtcaatcagcagaggaaatgaaaactacatatccgtgtttccgaaaaggcagaataatatttcattcgtttcctcgcaaatatttattaagtgcctactatgtgaaaggcgccagggaagtctgggtggggaggagcccagaatctttcggtaactcagggcagtggccttccacctgcgcttcttggaactgccttactctgagctggggctcctggagaggcttcgggatgcccggggggatgaggagggttagtgagcggctggaccgtgggacccttcttcctccccaaaacaactgagaaagtcagcttttagtttgttttgtctgttggattccaagtaagattctgtttgaataaatagctctatgggcaaaaacaaattggaactcccggtctagttaatccccatgttttatggatgccagaactggggctcagagagatcaagtgattcactggaagccacatagccagaattagaaccaggccttcttgagtcttggtgcagtacatgtgtagtttgaaaatatgtaataaatagagagctactaaatggtggtgtgtatgttctaacaaaattcctggttcatacttggacttcaaatttgcatctaactaataaaagattccatggtattgtccagaatgttttttagatttttgtttctagaatgttttagaccaatacaagcattgaattaagcctgagttatgcagaagcgttttgttctttgtccctattcttctcctacaaggaattcaccagtgtggaacagtcagggaggctcaggctgtccagttccctgcccagccagctgctagctgagctcagccttgggcaagttacttcatctctctaaagcttcaactctttcatctttaaactaagaatgaagaggataatatcaaacctcattgggttgctttgaagattaaataaaaatgtgtacataaagcatttagagactgggcatggtgggtcacacctgtattgccagcactttgggaggccaaggcgggaggatcccttgaagctaggagttcaagaccagcctaagccacatagcaggaccttatctctaccaaaaaaaaaaaaaaaaaaaaagaaaagaaataaaaaataggccaggcatggtggctcatacctgtaatcctagcactttgggaggccaaggcagtggattgcctgagctccagagttcaagatcagcctgggcaacttgatgaaaccctgtctctactaaaatacaaaaaattagccgggtgtggtggtgtgcacctgtaatcccagctactcaggaggctgagacaggagaatagcttgaacccgggaggcagaggttgcagtgagccaagatcatgcccctgcactccagcctgggcctgggcaacagaatgagaccccgtctcaaataaataaaaataaaaatgaaagcattttagcatggtaactggaccagagttaagcacttaataactaatagctattactattaatattaactaaacccaaactctgattttctatgtagaacactatataaaatacaaaaaaatctgagtatgctaagatgatttcattaactttttattggtggtaatcattgattttatgaaatggattgatagcctgatcaagtatatagtacttcagtatgcattgggctcttcagttaaactctctagacaccccgtctagacactgtgtaaaactctgggaggcccagtgattgataaggtctctgtcagctaagacctgagagtggcccctgcgtgctgtaggcatggggcacttgtcttattgtagaatagcatggcctctcctactcactcatctgtacaactgcaagtgttacatgctgtgctactgctaatagcatttttagagctgctctacttttttttttgtcttgtgtgaaaaaaaaattgcatttagttgccgggtgtggtgtctcacacctgtaatcccagtactttgggaggccgaggcgggcggatcacctgaggttgggagtttgagaccagcctgaccaacatggagaaaccccgtctctactaaaaataagaaattagccaggtgtggtgacacatgcctgtaatcccagctactcaggaagctgaggcaggagaatcacttgaacccaagaggtggaggttgtgttgagctgagatcgcaccattgtactccatcctgggcaacaagagtgaaactccgtctcaaaaaaaaatgcatttagttgatgctcaataaacatttgttgggtgaataagtgaaagatacataccaaatgaagaacataggcaggtgatcagtattatcacatgatttatttatttaataaaggccttggatgaagtcattcctgcttatgtttcacctctttgtgtgtgtgtgtgtgtgtgtgtgtgtgtgtgtgtttctctctctctctctctctgtctcctcactagaatatgagctccatgagggcagggattttcatctctttcactaattgcattctccctgggacctccttagagcaatgcttggcacatactaggcactcaatatttgttgaatggagccatctccctgtagcatttgacaatccttcctaagaagaaaggaaggattcctcagcctatttcctacccttgcaggacttttctctcctggttctccacctatctccctggtctgtccttctccagcttctctgatggcttcttttcctcctccaagaccctcccatggtagtccacatggctctatcttggttccggtactttctgcaaagattacatcaagtctcacagcttcacctctcccctctgtggctgagccacagaagtgtgaacctttctcttgaatacaagtccttgttccccacagccttctgggcacactcccagctggtgtctgcttggtcttcatacttgccgtttcatggccgagtgcgccatctctttcttcaaagtctctcctcttaggagtgagtaagaatactggcttggaagttagacctgggtttgggtcctgagtccgcctcctgctttatctgcagctttggcaaattcctaccctccttgattctcatcttgaaaaggatgattttggtggcaatccctttggaagcttgttgagaggattaagggaagtaacaggcatagaatgtccagtggaagtgccccgccttttcatatttctgtggctgcagccactgctttcccagctacctaaactcagtatattgcagtcacttctgagtcagagaattattttgctccttgactcactcactcatactgtgctgttcttttccttcatgacttgactccttctttcccattcctcttgctgccagcctgcctcagactgtctaatctactcagtaccatctctctgcctcactttctcctcctcaaattcttcccctccttcatctaatctttgttttccataaatttctagtgaccaaggatctcttcataaagagagagggaaagggaaggggtgagaggggactcactgtgggttcaggagttcacacacacacacacacacacacacacacacaaatgtatgtgtgtatttaaagactcaggagtttagtttgaaaactttgatatatgttaattaaagccattgagaacaagtgcaggtcatctagccttcatttacaaagaaaaatgaaaaaacaaaaacgaaaggaaaagtgacttttctttcttctgccctgtagtgaaacttggtttccagcaaaccagcaaacttggttttcatcaattatgtcttaataggtgcaatatgatgaaaaatattccccatggtcataagtgctcagcacgtagtaagtgctttaaaatgcttatattttcgtatttcttttgcaaagaccagaacacaaagtagctttttgtcaaagctttatttgctgattctgctattgttttccccaggggaactgcccctttattgattaataaaaggttaacaatagcctaaatgtgttaaggcaaatggttgggtttcagttttgtggttgaggttatttgtgttcttgaaatcctgttgtttcctagtgatcaacaaaataaaataccccacttcttttttaaaagatcgggatatgagagcctgtttttgaacctagaaggttcacctttataaatatttctgcattttatgggctttcaggatattgtcattggagactgtttctgttatgcagaattttcacaggagttggcacaaatagccatctggcttctgcccctggcattccactaaactgcctggtcaggtcagtggggcctcctggatcaccaggtcccatggattgctctctgtggcaggtgacactgggaccacttacttcttgaaactcctccaacctttggtttcctttgtaattcatatgtggggtaatagctctgtggctggcttctgtgagctgctggattcatggagatgacggagatgtggctttcacccttaaagaaattatacctagcagtggacacaaatgtgtagaccaacaagtgcaataagatgctatagaggcttggcgtggtggctcacgcctgtaatcccagcactttgggaggccgagttgggcggatcatttgaggccaggggttcaagaccagactggcccacccagtgaaactccgtctctactaaaaatacaaaaattaaccaggtggtcatggcacgcgcctgtaatcccagctacttgggaggctgaggcaggagaattgcttgagcctgggaggcagaggttgcattgagctgagatcgtgccactgcactccagcctgggcaagagagagagatttggtctcaaaaaaaaaaagctatggaggtgtcagaagcctgtataatagtgatgttcaaggtgtatatggggattgggtggagaatatggagaatctcctgggggagacatgcaaagtttaaaatacaccccctgccatgctttttaatacatcctctatcacctggtgaatgactggatgtgggaagttaggggaaagggattcgactcttaggcttcatatacacattttgtcatcgtgttggttgggataaggaatgtagctatttgaaagaacccacagatcttggtggcttagcatggtaaagattaatttcccatgtcagtttaaggccgtttggtataggtttcactccacacagtctttcaggaacccaggaattcctccatctagcaaccctgcctgagctttggagtcctcctggattctccacttgtatgctctacataaaagggaagagagagagagagcgtgggggattatgtagatttttatgggttaaacctggaagtagtagaagtcatttctgcctgtttagtcacatggcccacctaatggcaagagaagctgggaaatgtagttgagttgtgtgtccaggagaaaaaagaaatgggatgtcttagtcacctaatcctgttaactataactctcaaatgtctccctaaaatctccccgccacttcccatcaagtgcttccgtcagaattcaagttgtcatgatctctctttcacctcctgaagagcaagaattttctaactgacctgccttcagaataatccttccctagtcaaccctcgatagtaccagaggaatcttgctagaataaaaatatgagcagatcatggccctccttaaaaacctgctgtagttccctgtccccttctgaactccttagccagggacatgggacccttctccaccaggcctcatcttctgccactctccattgtgaactctttgttccagtcgttccaaaggagcacatggtttgcagttccacatccacaaactgtgtgctcacccatctctgccttacacatactgccccttcttcctggagttcccatccccgctttgcccgcttgatgagtgctaggcatccttcaagattcaccttctctgtgtgaatttctagatgtgaatttcctggtggtgctaaattgttctgccctcaattttcccatcatgtgttcatgctcattttgttcaggtcatggcgggaagggaggcttgagagttaaatgaagggactgttgtggatgtttgggcaactttaagggaaataaacaagggacagtggcaggctgtggaactagcaacagtggaagctgttaccacccttgcctgaggaggcaggggagaaagctggggaagataacaagttggggagctgtagctatgggccctggtagagggatgccgccaactaccaagctgcagcctggctgggaaaggaaaaatgtcccgacctctttgtcctctcattccctgatcccctgctaccaccttgcagtaggccaaaaggaactgaatttgaagggcaaatggatgctgacttttccgggccacagagtagggtggagaaggggcagagtagggctgaatggcaaaagaagaatgcccagcacagctgttatgtctctgttatagttcctaacacagtacatgaaaattttttatgtacatatctttcccaccaggtgacaagtcccttgaatgcatgtttcatatttttctgaaccatggatgcctagtacaacctttacaggttgttaaaaataacttttttatttttaacctgtcgtagtctgttctggctgccataacaaagtaccataaactagttagcttataaacaacagaaatttttttctcacagttctgaaggctgggatgtctaagaccaaggtgccagcagatccagtgtttggcaaggacttgctttctggttcatgtatagtgtcttcttgctatgtcctcacatagcagaagggatgatgatgaatatttctggggcctctctttttttttttgagatggaatttagctcttgttgcccaggctggagtgcagtggcatgaacttggcttactgcaacctctgcctcccgggttcaagcagttcttctgcctcagcctcctgagtagctgggattacaggcatgtgccatcatgcccagctaattttgtatttttagtagagacagagtttctccatgttggtcaggctggtcacgaactcccgacttcaggtgatccccctgcctcggccttccaaagtgctgggattacaggcgtgagccaccacgctgggcctggggcctctctcataaggccactaatcccattcatgagggctccaccctcatgacctaatcacctcccaaagtccccacctcctaatacatcaccttaggggttaggatttcaaaatatgaatttgggaaaacgtaaagtccattgcagggcctgtttgtaatatttaagtgaaatattaagctgcattattgtctttttatttttaaacacttaaacaccattttctagagttgtcttaccatgtgaagcatatggggggttttgttttgtttcattttcctgacctgcattttctcatttctcagccaaacaggcaggactcgtgaaattgtgatgccttctaggaactacaccccatacacaagagtcctggagttaaccatgaagaaaactctgacttaggcactcagaggcatacactttttacagatggacaaaagctctggaaccctgtggcttcaaatcctttgggaagggtgactgttgtttcccctacacacagtgtaagccggaatgggaatcgctgaggctctgatccacttctaagacaggaaggaaagtgaaggcagagtgagcaggtaagagagggatatacaaggtcacatttcagacacccactcggcataccctgccgtactgcatcatcatttgttttctttgtagacactgaaatcctatcaggaggattccttcacaatgtattttatttgctagactttggttgggagggaaaaggacattaatttgaagtttcatgttattcatgccaggattgtttgatagagcatgaaggttttgtttacccataaaagtattagaggcagcgtttctctgatacagagaggcctgtccacaagaagcatgggcacccagccaaacttgaacctggaagggagggttcccggcctgcaggtgctctttcctcttggtcccaagcatctgtgcagggtcgtgggagccacactgagagacttgtgtgggccagacaagcttcattctgatgcgctagtcccttggtttaatttgtgccttatgctttcattggaccagctgaaatcactgtatttattcaactagtgatttttttttctttctcactttaacttaaagagaattttatatgtcttggaaatttaataatttagtgttctcagtatcaattggtgtttttgttaaacgaatgaatcatctgttcatgcatgctctactttgatattataacctatgtcacatgtgtttaataaataccatatattttgttctactaatgttgtctctctgtttcatccatgaccatgtagaaggggcagagagcagatcaggctctggaatgagtgtcaaagtcaaatcacatgatcttccagccagtacaattcatacaagcatctgtaaaccataagattgactgtgtgtgtcgggggagggtggggggcctatctgtctttttaattgctgaactttagttaatacaccatgtggaaaaagcaagataccttaatgatcacaaagtacaaaaatagattttacttttaaacctttcctcaaacctcccaccccttactgtctccacttccaaaaaaccaaagaaataaaaaagtaagaaagcaaagcaactcagttagataaatcactgtgagtcagaatcatgctaagaggaaaatgtgcatttgggagccacatttgtatttaaacactgtccgtgggaccttgggcgagtcgtcaaggctctctgaatattagtttcatcctttaaaaacctcggattatcacacctacttgataggctgacgtgagtgccacatgaggtcattcccacatagggagtgggcactgctaggcacacaggcagtgattgctgtcattctggaggttttagagcactgctgattgctggttgagtctcaccactggaggtattctagcagcaaaaaaccgtgttctgtggcagccaccaagaaggagcacttagagaaaaagctgtccttaggaccaggagatagggaagctggactcagagagaggcagagggttctgggagcccatccccctgaagaaactggtctggaagcagtttctaagtgaaatgcaatgacttaaaaaatgtcaattttaatgagaccaaggtagaaatgaaaactactctgccaatacttccacattcacttctttctctctctcttaaaacaagcaaggaaaagaaaaacttagtaattttaaatttaaaggataccagggaccattctgcagctcgggcctttgtattttaaaatatatcttcaacatatggaaaattctaaacatgatttgaactactcaagaagactattaaagagagttcctaaattgtacagactgaaaccgaaagaagctgagagataatccttccagatcctttgtcaacattgactctagtgccccccaaccctccatctaaaggactgacattcatcaacctcttcatgagcaggggtattacataaaattgggagaatgaactctaacatttcatagtaaatttatctcactgaaatggaaagcagcagtgtatgtaaagggtttttaaaaaataaaacaacatcctataatcttccaattaatatcttcattccagaccttccagaattttaaaacacacccgctccattttgtttttaaaataaatataaccctatactgagaagtggaatcatgtgatttttaagaacgtgggaacactcgagtcagctatctgagcttagtcactagtgcgcatgtgggtaagtcacaaccctgtctgagggcctgtaaaattggaactgtgagagttctttcctaatggggttggtgtgaagagtaaatgagttaatgcctgcatggttcttagaatagtgcttggcacatgataagcacttaatatatgctacctattaacattacatacttttgtagccactttttgcttactttatatatatataaatatatatatacacacactttatatagtttgctttatatatatactttatatatagtaagtttgcttactttatatatatacatataatatatatttttgcttattttatatgtatatatactttatatatgcatataatatatatgtatacaatatacataatatatattatacacatatatgtatacaatatacacatatattatacacatatatgtatacaatatacacatatatattatataatatatgtgtacaatatacacatatatattatatataatatatgtgtacaatatacacatatatattatatataatatatgtgtacaatatacacatatatattatatataatatgtgtgtacaatatacacatatatataatatgtgtgtacaatatacacatatatataatatgtgtgtacaatatacacatatatatgtgtgtacaatatacacatatatatgtgtgtacaatatacacatatatatgtgtgtacaatatacacatatatatgtgtgtacaatatacacatatatataatatgtgtgtacaatatacacatatatataatatgtgtgtacaatatacacatatataatatgtgtgtacaatatacacatatatataatatgtgtgtacaatatacacatatatataatatgtgtgtacaatatacacatatatataatatgtgtgtacaatatacacatatataatatgtgtgtacaatatacacatatataatatgtgtgtacaatatacacatatatataatatgtgtgtacaatatacacatatataatatgtgtgtacaatatacacatatataatatgtgtgtacaatatacacatatataatatgtgtgtacaatatacacatatataatatgtgtgtacaatatacacatatataatgtgtgtacaatatacacatatataaatgtgtgtacaatatacacatatataaatgtgtgtacaatatacacatatataatatgtgtgtacaatatacacatatatatgtgtgtacaatatacacatatatatgtgtgtacaatatacacatatatatgtgtgtacaatatacacatatatatgtgtgtacaatatacacatatatatgtgtgtacaatatacacatatatatgtgtgtacaatatacacatatatatgtgtgtacaatatacacatatattatgtgtgtacaatatacacatatattatgtgtgtacaatatacacatatataatatgtgtgtacaatatacacatatatataatatgtgtgtacaatatacacatatatataatatgtgtgtacaatatacacatataatataaaatatatgtgtgtacaatatacacatatatattatataaaatatatatgtgtacaatgtacacctatatactctatatgtgtacaatgtacacctatatactctatatgtgtacaatgtacacctatatactctatatgtgtacaatgtacacctatatatactctatatgtgtacaatgtgcacatatatactctatatgtgtacaatgtgcacatatatactctatatgtgtacaatgtgcacatatatactctatatgtgtacaatgtgcacatatatactctatagagtatatatatatactctatgtatattctatagaatatatatgtgtacaatgtacatatatattctatagaatatatgtgtagaatatacacatacattctatagaatatatgtgttcaatgtacacctacagaatatatgtgttcaatgtacacctacagaatatatgtgttcaatgtacacatacagaatatatgtgttcaatgtacacatacagaatatatgtgtacaatgtacacatacagaatatatgtgtacaatgtacacatacagaatatatgtgtacaatgtacacatatataatatatatgtgcacaatatacacatatataatatatgtgtacaatatacacatatatatgtataatatacacatatattatatataatatgtgtatattatacatatatgtgtatagtatacacatatatattatataatatgtgtatagtatacacatatatgtataatatacacatatatatgtataatatacacatatatatgtataatatacacatatgtattatatataatatgtgtatattatatacatgtatgttatatataatatgtgtatataattgtatataatggatataatatatactatatgtatataatataccaatagtgtatataatatatacgtatatatattatatatagtatataatatatacgtatatatattatatgcgtatatattatatacacctgtgtaatatatgcatatgttatatacgcatatgtaatatatgcatatattatatacgcgtatgtaatatatacatatatatacgtgtatataatatatcatattatatattgtatacgtacataatatatcatatataatatacgtatatatcatatataatatacatatatatatcatacattatataatatacgtatataatatatcatatattatataatataagtatatcgtatatcatatatcatatattatatatgtatataatatatcatacatgtatatattatatacgtatattatatatcatacatgtatatattatatacgtatatatcatatataatatatgatatatacgtatataatatatacatgtatgatatatgatatacgtatatcatatattatatattatatacgtatatcatatataatatatactatatcatatatatgatatagtatatattatataatatattatatataatatattcacatgcatatatatgtgtatatatataaagtatatatacatataaagtaagcaaaaagtatacatatgtattatatatagaaatatatacatatacataaagtaagcaaaaagtgtatatatactatatatataatctacaccattgcttcttataggtaattggattccattttttgatgtcccataatttatttgacccatcccttagtgttggaatcttggatgttgtcttcacttttcttcagcagtcctctgatgaaccatcttgtccacacgtttttgcacacttgactgattattttctcaggatcagttcctagaggaattgtctggtcaaaaggtgtgcacacttttggtgcctatggtccaatacggcctatggaaatttgaattcattgaaattctcactaacaggctgagaatgtgacttcctgactcttttgccaacatgaggaatgagaaacagagtgtacaacatggctttctttaggcagacctgccccccaaacaggtggtgaacaaagttccttcagcatattgcctgtggatatcagaactcagggacatgcaggtgtgagctgcgggcctggaggtgtccctagggcccagagagtgcctgggcagccgacgggaaactggatggactcagaaggagcaagtgtccctcaggatccaggaatcaaagaaggcctgccgcttagtgagccagcatcaagagcctgtcactcaggccacatgcctaagatgcggtttgactctgagtggggcatgccccctatttcagggatagcctgggagagaggatcaacatttgggaagtgcttggagggtgcaccaaccaaggctgacccctgagctggtccatgtgtccactgtgagcacccactttcttcccagtgaatgccatctgcctactccaggaactctagggtggtcaccagggcaaggagtgggggtgataggaatgggtcctggctcaagtcccactgggccatggtgctcttcttgacggccagactgagagggccagttcagttcacccagcacatgccaggtgcttggaagacaaagaaatgcacctcgagacccttgctgtctccaaaatcttttccagcaagtccaggccctcctgatctttcccatctctgaatcccaggggaacttattttcagccccttctttattcttacatctcatgaccaatctttgtgtacatttattatctctccagtgacataaactcctcaggggcagtgtcccataaggggcacactagtcatttggagggaagccattgtaaaccttgataagcatgaagaaatctacaaatgaggagtattccagaaaaagcctcggctttggggaagtaaataataccaggagttactgagctggacacagcacacatacactgagtctttacaacagtcctgcctggaagatgttatcaccaccatttcatggataaggaaattgaaactcaaaaagatgtgaaaattgtctgaaaccactcagacctgtctgatttcagaacacaggtgggaggcctggagtcagtcccaggtctgccattaaatcacaatacctccttggtcaggtcactacagcactctgcagctccgtgccccaggatgcagctttttcgatgaagtaaatggaattgcatcccccacccaggcttgctgcacagatcatggcatagcattgacaaatttcctagcagttcatcagagatatgccaataattgatacctgctactattactagtaattaccgggaagccagtattgcaccaagaatatttgcaaacccaaggatttcttcttattggacacagagattgaatgaatgctagcgaatggaattgtgcagaagacaaacaggagtgagggaaatgctactggataagcaggaggttaaataaactgtatctccttttgtttagatgtgaatttaagaataatctattttactttgtcagggaaggaaaggcctaaaagggagactaaagatgagttgctaaaaaagagagaacagaagcaaagagaccagaaggtgagtgctgctaaagcttggggtaattcgttaggcaggattagataactaatacatggtgtgaaaaatatcgttgcattttgtttttgcatgcaaatatctaattgttttagcactatttgttgaaaagactacccattttccactgaattgcccttgtaccattgttgaaaataaattggccatatatgcataaatctatttctatactctctatactgttatattgggatctagttgcttatcttgacactaatactatgctgtcttgtttgctgtagctttatcatcggccatgaagtcaggtagcacaggctctctaattatatttttctaagttgattgggctattctaggtcctttgcatttctatatgaattttacagtctgtcaatttccacaaaagcgctattgggattttccttgggactgcattgaatagacaggtcaccaaggataacatcaagaccttgctgtgtcaggccagctcctagcaacactgcagcccaagttgggagcactaggttggctcctggatgtcagtgactgctcttctcttccttagctggaaaggtactgggaaaaacctccatagtgtattttggtaaaggtatagtataatctttgtgggattccgaacaaaatattataagaaacattcatttgtgcccaagggccataaacttggtgtaatctgaatgcaataaattataaataaatggcaaacagttcttgatggttttctcttaatttttcaagttttaacatagagcgtttacaggattcaccttcctgatttagggatgggaggggggttgagaaataattagtaggcaattttttggccctgggacttttcttgtaaatgttttctttggcagccatactcttgagaacaggaagttactctcttgttacagatttaagacttttctgagccaaataacagaaagctggattagttctgaaatgaagtggggggaaaaaaaacaactctaggctcttgctggagattaatgacatcttacaaatattttaattctcccctttcctcttaacttgctacctcctaaacaaaacacactcagactgaaaaaaaaaaaaaaacaaaaaacttaactgatcactttgtagcccaaccttaaaataaaatatctttatggtgcccacaaatttatgtaaacatttttggggtgttaaagggaaggaaaatagggctgtcttaagtcgatcctttttttgttacaaaatccccaatatgaaatttagagcataaaatgtagttgtaaagatgctaatttttctatgataatcacacagattcataattttctttgatctttttaaaatggcttttaaaaatagataaaagtgtttaatcaagctttgaaaactatgcctatatgttgtttgagatggttgcaaacaattctttagaaattgttccaaatgacaggattatatcctttgactagagcatctctgactataaaacaaaggaattatttcctccaaaaagactgagtcctcacagaagggcatgctgaggtagaaataaaaaaaaattaaatttttacacttgattctaaaaaaaagttgtaatcttaatgaagttcataatctggaggaacattaattccgtgaattatctgagaactatttgtgaggattgtttttaaaattgctttaaatgtaaaagtttttattttttgcaaggattcttaaaacacagaaggccttataaaaactttgagattgagaagtaaagaacgctttcctgtaacaagtatatatcttctactagtaatctaggaagtttctatggtattaattgcagcctcagaaaataaaagagttggtctaagtgttttatttgcacttgcctcctgcacccaaattcaaatgccctggtacccaagaagtttgcctatagttgagaagggtaggataatagggccagtagctgatgggagcaggggaggatgcttccctgggctataagaacatgcctatcctaaagtcactcaaattcctaagtctgaaaaacactgtgctgccaaacacacccatctgtaatttgaatgtggccaaagacccacaatttgccacccttgacttgcattatctaatgtttttctttctgtatattatgaagaggatatttattccttcatactaactttcttcagtctgcttgaggtgatgcccttccacatcattcataatagtttcttgtcttctactattattgacaacttcacttttttaaccttataaacaattttaaattactcggagctgtcatccattagatataaaaattaaatggagcccaggaattctaggtgatgggaaacattatccagggctgtaagacatgcacaactatgggagtccagcaaaggctgataagcctggagctccagcaatgttgggtgagcatttatttaaagggagctacttgcttcctggtttgactgcataccaaatatatcttctcaacatttatgagcttaaatagatgcagatgttgccagagagtgtattgtaacattcatcatcctagaatcatataatttaagtgttgagaggcatcttggacttcggttcaatactctcattttaagcaggaggaagctgaggttcagaagagttaactgacttgccacaaagttagtggtccacaaaccctgccccataaaaacattgttgagggttgacaaattttactaccaccacctccgttctctcatctggattgctttaattgtcctatacactatgcttgactattatctcctcccaattttcaagaagaaaattaatgagaatttttttttcctgaataattcttctttatatttcgtgggcatcccttacttctctccatctccccactgttgatgattttcagagctgtgttctttctcatgtaagatggaaattaaaggtgaccagacactgattttggccaggtctagtgagaggagaggggttagtttgttttctctaactctagcctgctgctgatcactagtttatttatttcatggcctctgatggacatcagactccaaatagtgagagccatggtgtgctgacactgtagcagaaatcagttctttccatccactaaaaagacaactacctccttggtgaaacctgaaatgatcttatgaaatctcatcctgtagtgactttgcaaattacctcactcctccttttctgttttctcataaatatatgtgcagactgtctttcctcaaccacaaaggaagtgtaaacatagtttatctgatgttttatgaattaaataatttctatagccagacttatatgatgtacttgatgttttatgaaaaatcttcagtgaggcccatttaagtgtaggacagtctgccctccagcatagaatttgaaccaattctaagcaaagtttggctgttatatcctcctactttcctgccctacatactctccaaatcctagagatgagtactctggggtcttcctattatcctaaactcactgatgtaatagtctgtctggtgtgttcttcttctcagattactcaaaattctctccattttctccctttccctcctgaacaaatttcactctttgggtttaggtcatcatctcagctaggctgttatgaagaagcattttggaactaaataatactcacgtgtaaatgactaatagatcatttatgttctcaaaggaagatctttgttcaccatataatcttcttattggtggaatttcactcaatgtgtcaaagggaaggaaaataagtcaaggagaggggaaggtatttttaatcttgtttaagattttatgtcttaaactgagaggaggggccttagctacaatgtctatatagtctgtgtcaaagaccgtgtgctctttcaaggatttttttcccagtttgtgagttttttcatatttaaaaatcttacaaagttttattattcaatcacaattcagttggtcacatatctaaccagcaatcttcattaaatttattaaaaagtaaacttacatgaaatttcagagtaccaaacatttaataatttaaaaaactatgtcttcccacactatcaagatcataaaacacagtggtggcctgaaatgggacattcgtcactaaaaaacacttcagccatgtgacggtattaacagaaaagggttcttttccaccaacttgaacctcacttggctgagattttctcaccacagtctttgtatttttttttcccatgggcaactgcccccttgattaatcccatttcccttagtcctagtttttccaggcagctgagcaaacaaagatgcaggcagccattttaacgtgcttcctccctcaagccctctgggatgggccgtctgttcatcctgttcataaaccaacggcctgaatgggcttggagaaagcagcaaggatcttctgtcaggattaattttaataggccatagtctgtcacccgggaaccatagcccaggcaaatggctttaaattactatttgctgataaaaagggagatatgagctgaaaatttggttcctcatttaaaacaacttggataactaatgcaagaatttacttttagtgtggagtgcaggtactttacagcctaaacccttgggtagctgaggaaaatcttttgttgccatgggatcacagtgaaatataaagaggggaaatgtggcagtttgtagaagtatagaattttagagctggaagggaaataaaaaatgtatctgtgacttcctaaggacttacgtttagagctttatatttctgatttctgtgcagagaaacgcgattcctcttattgccccttctacttttttgtctccctctttaccaattcctttctctttcctttttttcactgtttttctcatacccaattccagttccttgttccttcccttggttcctcatccctcaccagccaggctcctgtcatttctctgtgaagctctgcactggggggcacatgaggtagcgtggtgaatgtagcccctaggcaaacaagtcaggaggccctagctcttgtctcttcccttgtaaagtgtgagaaggcagtttgggggactgactggaagggatggttttgtaaaatgacacactgatgtcagccattattgttcaataaagtcctctgtgtaccattcataagtaatttttttattagctatggccattgttttggtttgtttaaaaattcagaatgtggctgggcatggaggcttacatctgtcatctcagcactttgggaggccaagatgggaggatcatatgagcccaggagttccagaccagccctgggcaatatagccagaccccatctctccacacacacacacacacacacacacacacacacaaatcagctgggcatggtggtgcacaccagtagtcccagctacttgggaggttgaagcaggagtaacctttgagcccaggagtttgagactgcagtgagctatgattgtgccactgcacttcagcctgggtgacagagggagactctttctcaaaaaagagaaaaaaatcagtgtgttccatactcaaatggatgcttccaagaaaaatcatggaagaaaatagaatttgcttcatacttctttatgacccttggttcccatctcttcctttccagccagctcccctcaactctcatagatcatatcacttgttcatggagaaaatgttctccacattcctttacaaacatgactgataccataaaaaatgtttggtgcaagttctgtaatctttcttaaatagcccagcctgggcacttgagcaagaaggctggtggctaaaattaaacaaaacataacaaaaccaaaaacaggctgggcgcgatggctcacgcctgtaatcccagcactctgggaggatgaggcgggcagatcccttgaggccaggagtttaagaccagcctggccaacatggcaaaaacctgtctctactaaaaatacaaaagattagccaggggtggtggtgcgcgcctatagtcctagctactcgggaggctgaggcaggagaatcgcttaaacccgggaagtggaggttgcagtgagccaagatcatgccactgcactccagactgggtgacagagcaagactacatctcgaaagaaaaaaaaatgcaaagaacaaaaacaaaacccaagtgtcaatgaagatgttgagcaacttcattgctgatagagtgcaaaatggtatagatactttgtaaacaatttggtagattcttagaaacattcatttaccctatgacctagttatcccactcccaagtgaaatggaagcttatgttcatgcaaaaacctatacacaaggtttatagtgacttgattcataatcagcaataacttaaagcaaataaatacctttcaactgtttaatgtataagtaaactcctacaatggactactatacccatagaatacaacactacttagcaataaaaaggatcaggttactgatacctgcagtggcataaatgaatctcaaaaccattatgctaagagaaagaaggcagattcaaaaggctactgtatgattctacttatatgacattctggaaaaggcaaaactctaggacagaagacaaaccagtagttgccagggataggggttcagtggagaggctgactacattttggggggcatgatagaactgttctatatcatgattatggtggtcatcacaaaactgtatgcatttgtcaaaactcagacctgtacactaaaaagggggaattttactacatgtaaactatatcaataaatctgacaaagaaaagaaatatacagtattaatttgcatgttattcattttaaaataaatggtattgttctgcaacttgcttttttcacttaaccttaagttttggagattaaaccttgttgaaatctgtagatttagttccttcattttaattgacgtagttttcaatttttgctaccactataaacaatgtggcaatgaatgttctgacacacgtcttctttagtacatacaccgagtttccttaggaaggctagtacataaatgctgtgtgttggattgcagagtaggcacgtcttccagtttactagatgtgactgcatatctttcctaagtgtttctgccagttcagtctctgtaacacatgagctcctgtttctccaatcagaaagagtttggaatttttaagatttttttactttgcatttccctgaagttgaggatccttttttaaagcatgttttctggtttttccagtttcctcttctgtgaactgttcgtatttttcctttttttttttctgacttgttttgcttattgatgtataagaattctttttgtaaagtgtgagtttttgtattctggatgccagcttgctgtttatatgtataatagcctttacccttctacactacagaagtttttgccttaatgtagttaatttacaaattatttcctgtaaagtttgtaaaatgtgtcttaagaaatccttcctaaacttgtgatcattgaaatgtttttctgtaaatattatttttcaattttaaatagtagtttgttaattcctctggaattaatcctcatgtctattggaagtaggaaactatttatattaatactttttcccatatacacaaccaatctctctagcactatttatgaaaattcactctttcctcactaatcttaaatctcaaatcaagttcccatatatgcatgggtctatttcggtgttctctattttgttccattggtctatttgctgcaacaattatataaaattaataaaatgtaattaaaaggccaggcacacagtagggccaaagcaaaagctagcttcccccactcctcagtcagctctctaaccctaaagtctggtcatcagtgaagtcttggtttttctaaaagaatgatgctgtttggctcccttgttggtgatctttattcccactgacttcatctggtccaaatctctggccagcctctcctttaaattcccttttggtactagctccccactaatcatcaatctgctgcctgcatacccccaacttggcccagtgtcactatggccaagtctaggcatagaggctggacatgcttctgcattgccccataacacccccaccccctcattctccagcaatccccatgtggcggtcgggccatttctcatgctgagaggcccaacaagtgtgaagttgaacactttcagtctttgtacattgacactaatgtatcccacattagtaatccaagtgaaggaagcaaaattaaatttcttaaagaaaaaaaggctgggtgtggtggctcatgcctgtaatctcagcagtttgggaggctgaggcgggcagatcgcttgaacctaggagttcaagtctagcatcggcaacatggcaaaaccctgtccctacaaaaaaattaaaaaaaaatttagcggggcgtgggacacacacctgtagtcccagctacgtgggagggaggctgaggtgggaggattgtttgagccaagaaggctgaggttacagtgtgccgacattataccactgcactccagcctgtgcaacagagcaagacccgtctcaaaaaagaaaaaaaaggtcagaatttaagagaggaagagagggtcgaaggagggaaatacaaattcagttttggacaggttgagactgagaaacctttgagacattcaggtggtaaggcctttaccctgactctaattctagtcccagagcaaaaccccaaaagactcctgtgcttaaaagcctggagagattggtaccttggaatttatggtaagagagagttttaagagggagaaactgctcaacagggtcagatgctgtgagaaggggaaggactaagacatattccttgaatctgacagccatgaagggatccatggtgcttgcaagatggtgaagaaatggagtcagagaatgtggacaattcttttaggacgcgtatctctgaaaaaagaaggcaggtggaagctgggggcagcttttaactgctttattggggtataactgacgtgctatacactggacatatttaaagtatacagcgcaataagttttttttaattttctctttttatctctagaagtaagttttgacttatcaaatgattacacccatataaccatcaccgcaattaaggtattgagcatccccgtcactcccaaatgtttcctcctgcccctttgtcatccttcctcccagcctctccctgacaccccacaacatccgataatcactgatctgctttctatcactatagatgcgttcgtattttttacaattttatataaatggagtcatacggtgtgtaattttttcctggcctctttctcagtatactcgagattcatcagagttgttgcatgtaccagagtattcgatcatatgcacagactacaacgtgtttatccacttacctactaatggattgtgtcaagttttgggctattacaaataaagctgcaatgacacttatgtgcaagcctttctattaatatatgctttcatttacctgtttctcttaggtaaatacctagcagaagaatggctgggtcaaacggtatattttaagaaactgccaaactggtttccaaagaggttgtactattttgcattcccattagcagtgtatcaaagttccagttgctctacatcctttacaacacttggaatggtcagtctttctggtaggcatgtactaatatctcattgtgattttattatttattttttcttggatatagagtcttgctatggtgcccaggctggtcttgaacttctgggctgaagcaatccttccacctcagcctcctgagtagatgagattacaggcatgagccaccatgcccagcttctccatgtatttttaatttgcattttcctaatggctaataacactggtcttctttcatgtgcttatttttcacttatatatcttctttggtaaactgtcttttcaaatcttttattccctaatctggaaagtggtgcccatcacttctaccatatttattagaagtgagtcagttaagtccagtcaacattccatgggagaggattacattggagtgggacactgggggccatcctagaggctgtctaccacgtgtggcttcccatttcttttagggtaaaatccaaactccatatcctggtctacaaagccctgctagatctagccccagccttccacattgcttttttttgttatttgaacatgctaagctccttctccttttacggccttagtatcttctcttgcctctacttgggatgtttttccatcagattttcccacagttgatcatttgtcatttgaagtcccagcttaaaagttacctcctcagaaaacccaacctcagtcacccaatcaaagtagtctaccagtcactccttatcaaatcactctgtactaattctctatgtgactcttagtactgatagaataaaagtttcaatgtaacaggaaatttctttacctcattcatcgttatatcaccaaatcctagaatagcgtttcacttgtgatagacgctcaataaatatttacttactgaacaaatgaatgagatctccaaagaagcaagaacagatgggatccatagtatagctgaagggattaaccttggataaagttcctgtgactactgctgtttaataaacgaccccaaatttagaaaaggcatagtgaagatgtctctgctccacaatgtctgaggcttcaatttggatgtcgtgaaggctggaagtgactggacagttggggctgaaattatccaaagttttgctcactcacatgtctggtggttgatgctacctgttggctgaaacttcagcttgggatgatagccaaaacatctacgcaaatgcagacttcttcatggcttgcttgctgagttccaagagtaagcacttcaagaaagctaggtagaagttgcatcaccttttgtcatctagactagaaaaatcacttttgctctagttataagcacgcccagattcaaggatagagaagaataaccccatttcttgacaggaggagtgttaaactcacatagcaagaagaacacatttaggatgggaaatattgttgctgccattctggtcaactccaactatatcatggccagttttgtggccattcatgccccaacaatgacaatcaaagcaagaaaacagaggagaacagcctggaaattctaaacatttatgtttatcagttttacaattgattgtcagtttttatcttcaactaggtaaggacaagtggaaatcattcccaggtcttgtttttgttcagtgtccttgtgtagcttcgtggcagtgggatgtctataggtcatcttggcagcacctcacgtgactaatgaaattttcctttcccttaattctgttttgaattttccttcctttcaaacgcagccaaatttattagtttactctgagagcaacattcaggagattaatccaagtaccactggaaaagtgattcatctttttaatgagcactgaaaaacacaaacaaaaaaaccccaaaacacttgcccagattcatttttataacggatgggctctttgacaggcaactggaattctttagcagagattagctgtctgtggtttgtgggctccatttcctttcaagtgtttggttcagctgcaaacaggtataacctgtagcactcattgtttctctctttagtcttcatttctccattgttaaatttctccattttatatcttcttctctagacactgctgtgaaaatttgtgtcctagatatttattttttgtttcataaattataaaagaatactttgcctattttccttttgaagtgtaaataggctgcaagtagtctgcttctgttgtagagtgatgttttccacttgccatgcttcctggttactgacaaaattagacagtttgtgcttggatgctggtgggaatttagatctgtattatgatatcttgaagccctaagccatactgtataaaagattctatcccaaaccactgaaaaatctacacagtaatgatgattaattatataaaaagcttaagatttgcatataagaaacatttcattaagagaaagaggaatatgggggaaaggtagagaaaaaaatatgagagaaggagattgtgtcaattactacatgctatgttcctgagaggagacagaaaaagtacaattatagctccctcacagaaaggactttacaattttgttaggaaaggaaaaagaaatctcgatgcataacacaattagagaagtataatatgcttcatgcagtgaggttccaactttaactaagccctataattgtgctgaaaagaaagagaagtttggtttggaataacatgggaaggttcagggaggaggtgagacttcagccaagacttacaattggcaaggggagaagagatagccttccacaaaagggtaacagaagggggcaaaattctgaggcctaaaagaaaggcatccttgccttggggacacctgtggcctacaatcagcacatggggagttcactactgtgggagaaataaaggcctccagctggggtccaggggtggggtgagggaggcttgcggggtgcttatcactgtaaaccaaaaataaaatttgaaggtccgccctcaaccgtctgaatggacttcctcctgtagtccagggtcctccaaatttaacctaaaagactggcttaggccatgatgggaagctgaggtcagacatgcctcattatgcccttctttcttttagaatccaggaaaagctacacagcatttaatatcaacacatataccttgagtctgataagaaacacaacttactttctctgaagcctgctaactggaggcttcatctgcatgataaaatttcggtctccacaagttcttatgctaacctagacattcctttaaatcaattaccaatcagaaaaaaacttaaatttacctataacttgggagcccatcttgccccacacccgctctgctttgagttgtcccacctttgtggattaagccaatgtttatcttaaatgtatttgattgatgtctcatgtctccctaaaatgtataaaaccaagctgtgcaccaaccaccttaggcacgtgttctcaggatctcctgagggctgtgtcacgggccatggtcactcatatttggcacagaatacatctcttcaacattttacggagtcttttttttttttttttgtcagtaccacagacaaccacctgactcgaggaccttacctatttctcattcagccaatgctgcagcacgttattaacgtccttgaaagcaagtcttatacagagaaaacttattttgatatattaatgaatctgatcagaatggaccagattggggggatagataaatggttgcaattgtgctccctggaatagctttggagtttacctagatcttctgtctctttaggacagagctgcttgtgtttatatagcatcttacacaggattgagacaacttcaatttcctatatcaaaaaatcgggggagggcggtgggttatgggggtgttcaaacctcccaagtgacatctgctgtgactgcatgtcttcctactctttccactgggatgcacctctggtagctgaactataacgagaaggtaaaagctgtgtccaatacctattaagctgccttcttctcaacagctggggaggtggcgggggtgggggggggcggagggaagtcttttcaacagttttacacatttggaaataggcctaaagtgaagaaggggattttcaaattggtgtgttggaaaaggggctgggcttttgagtttgaaatctggtgctgtcacttactggttttgtgccctgggaatatttatttcagttttcatgcctctgtttttctataggcaaagtagaaaattcgaaaaggtcctcaacgagtttgtacagctgctcccactccctcatcacctcttgtgggcctttggaaatgtatgttggaggagacattttggattgttgcaatgacttgggagtgccatagcacctagcaggcagaagccagaaacaccaaatgtcttaacaatgcttgaggcggtgctacaaatgaagtccttctccaaatgcattgagccccaagaaaaatcgctgattctgaggaaccttccaactttaacaatttcaggacgtccctaagctgagctaggaggcaccacgcacaggccggaggcaccacgcacaggccagagtctcccaaatcctgtcccgcactctctcccaccttattaatggccagctcatctttcaagtttcgacttgaaccacttctcagagatatcttcccaggtgcccatcccaacgttactattatatcataatttgattctccctccccccatccccccgccaactctgtaaaccccaagtataacacaggacgttgctatttgttgactgacacatagtgcttggtgaggtcacgctggcgctgaatactttttgtataaaccgacgaacagctgatgaccgcatgaatgctcacacaaggggaaagggcgccaagccaaggagccggcgtcatccgacgtaacttccgccctttaacgctcctgcggacgcccccttctcccagtccgtgtttgtttccggaatttcaataaagctcgattcggctcgaagaagaccccgttcttccgggaaaatggcgactcccgctcgtgccccggagtcaccgccgtccgcggatccggcgctagtagcggggcctgccgaggaagccgagtgcccgccgccgcgccagcctcagcccgcgcagaatgtgctcgctgccccgcggcttcgagccccaagctcccgaggacttggcgcagcggagtttggtggagctgcgggaaatgttgaagcgccaggagagacttttgcgcaacgagtaagctggggtcccgcggagtctccgccaggctccttcagctcgagctccctgggcgctcccctcccctcccgcactctgttcccttccctggaaggtgactttgactcagtcacattcgcttcagtcctacgggcgagtggacggagggcttgctgcggcagagccgtgcctcttcctggccaggcacgtatgcctgcgaggatagctcggattgaacggctacctggcgttgcagggagttagtagcccctggtcggttttatttacccggggactgtggtggttccatgagtctgctttctaaacccttttgtcgcccgcacccctaacccataacagattgtcagcttcatctctggattctaagcttacaggaaccgtaggaaatgggaagagtgggatatgaagaggggtttattaggccgggaaagttcgaccctcattcagctggctggttgaacggattttagcaagggagccacgtaataaaagtgattttgttttttaggcagctttgttcagcagcttgttgcaaaagatggtttgaaggaataaaaagcagaagacagtagaaggatattttcagagagacttcccacgagacacttgtaagaaagtgagctaggaagggattgggagaacttttaagcatggactaatttaaatgcagttgacagagatggctgaagtttccaatctatatggaagaccactagcaaaaataggaaaattcagggagaggaatagatccaaggttgattttacttagggtgtgcagagttgagaggagagcaggacagacatttggttaatcgaaaaccaaacacttaaaagctggagaagtagtcatgaggctcaagaaagagagaaccctggaaaaatacagaaaacaggaatttcagctgtagagtgttgttaatagttgaaattgtggggatgaatgtagtgtcaaaaagaacagaggacttaaggtgtaattttttctttccatttattgtatagttaaagaaaagggaatcagaaaaggaactctgtcatccagcaaaagggacaaataaataattggttgggatcaagacatgtgttttgaccttgtgagaataggttttgaatgtatagcagtgaattaactttttggtctcaggactccgttatactttaagaattattgacatcccaaagagctattttatgtgttgtatctagcgaaatgtatttacttatcagaaatacgtctgaagtctttaaaacataagcatacacaagcacacattctattctagaacaatgatgtcatcacatgccatgtagcctctggaaaactccactgtacccatgcgagaaaatgagagggaaataatatcttagtattattatgaaagtagttttgacctaataggcccatccccacactccaccccatccccaaattttggagattgcactttaatgactgctggttcttggaatgtcttatgtgattattatatgcttaaaatacttttgctgaaattctaatttgctgagacaaatgaggcatatattccctattcttcctgcattcccttgttttttgggctatttggataatgaccattttaattgttttattcttgttttggggcagttagaaatcagatatttgacttaaaaatcagcttttctttctttgaagataatgccttgcctttttaatgttatatctcaagttaaaaaaatggctgtaatgtaatagtattcttttccatttgacagaaaattcatttgcaaattgcccgacaaaggtaaaaagatctttgactcttttgccaaactgaaagctgccattgcagaatgtgaagaagttagaagaaaaagtgaactgtttaaccctgttagtttagactgtaagctaaggcaaaaagcaattgcagaagttgatgtgggtacagataaggcccagaattctgacccgatacttgatacttcatcactagttcctggatgttcctctgtagataacatcaagtcatctcaaacctcacaaaaccagggacttggacgtcctactcttgaaggtgatgaagagacttcagaggttgagtacacagtgaataagggcccagcttccagcaatagagacagggtaccaccttcatctgaagctagtgagcatcacccgcggcatcgtgtttcaagtcaagcggaagatacttccagcagctttgacaacctgtttattgacaggttacagaggatcaccattgcggaccaaggtgaacaacagtcagaagaaaacgcaagtactaagaacttgacaggcctttccagtgggactgagaagaaacctcattacatggaagtgctagaaatgcgagccaaaaacccagtgccccagctgcgtaaatttaaaaccaatgtgtaagtaccctcggaaacaggcctgtaacaggaacgtgatatttgttaaactcaaaaatttacgagaaactgggtgtggtggtgcttgcctgtagtcccaggctactcaggaggctgaggtgggaagacagctttgagtccaggagttgtagaccagcttgggcaatataataagaccttttctcttaaataagtcaggagaatgctctaagttccgtgggctttgtatgagaactacttgtagttaggaaataacatgttgtggcaacactgagaccagcctggccggagtagaagattcatgttgaaaaatatttagttttgaaaccaaataatcgacaaggtcttttaaagcacatgggggagtgttaaattttaggatgcttagccagtatttcataataaacacagagttggagagaatttattatgacttctttttttcagaaccattttttagtgtacagctttgattagtgtactatcaaagtgtactctctttgattagtctgtgaactaagggtaaagcaattgcaggagctgatgggctttccagcagaaattatttgcatgctcactgtatgtaagcaagcagcaggtgttgtggggacacaattaagtcaagattcttaaaactcctttgccttttttgatgttaaatctcaagtttaaaaacatggctgtaatgtatacatgtgtaatgtaatacaataccatgttcttcaaggagtttaagagctacatgaggacccaaggtttacacacttggaaaagagttaagctacataataataacagtttcagggggaaggaagctgagaagaggtttgaaaaactgtgaaaatagattcaggcaggataggcaaaaactctgcttatcagttccttgccataaatttgtttctgaaatttcaggaaaagtaaaatctttttgaaaataattgctatttacttgcagcaaatgtaacattcaactcaggtaactggtaccttcttcctatattgtatttacaagtatgtaacatcaaagttaaatcactactacctttctttgaaaaacagaaaacctctagtgaaaagtatctaaaacatgcttcttttttgttagactttaattctaccccagcattcattttaacctcaaaacattttatttctgctgtatagaaaatcaggattatactacattaacgtgatcaagtactctcttgtgtacagtggggtatctttcttcacttccaggatgacattttagaaaactagaaccatcatctagtcaataaataaaacaaagaatacattaatcccagttctgtattatggtcatttagctgggagtgggagagaggtaagggaatagtgaagagggctaccaagaattcaggaagtttaagagacagggagcctcctgtataagttagaggagaacaggaaaggcagggctttgaggagtccttaggccatagacaggtagggattgagagggttccgtgtgagaggtggcttggaggttggaaggtggggtcaggtagtgtcctttgggtcctttctgctcttccttctgcatactcttctggcttcatgtatcacctggatgctggaggctgacccctgtgcacctctatcccagatcttcccagaactttaggtttgcatagccaattaaccatgaaacttgatcacttgggtgttcccaggtacctcagcttaatgatgtacaaagtggaactgcagtttctttccaaggtgatttccatattccctaatagtgccaccaccttctcggttttcttcccctaaggtatcttcgatttttctcatctccatatctgctagccatgaagacctacttatttctttgatcttcatctctataattgttcttcatcttctgtcgaagtgaagactctcatctctctcgggctgtaattgtggccccttctacctctagtcttaactaccagtctatctccactgctgccagagtgaaatttgtaagatggaaatccgaacttgttacggagaactcttcattgcagtctgggcctaggctacttcccagccctctttctcgctgtcttttctgtgtagccagaaaagctgagtctgtctaccttctgtactttctctcactccccttgctgggatgcacttctctccttatttacatgggtaagcagttattattccaagactgttcaaagcttttttgaaacttttcttagcctccctgtctcccactagaactggccatttccttatgttccaatgtatcttgttgagatatctatcacagtatctctggtattgtattgcactgaaactttacatgtgtatttctttctactgggcaataagcccttttgcaaatgttctttgaataaatgaaaaaaaaaaaaaaaactccagatgaaatacaaggtttgaataaggaaggaaaaggcaaagagcctgtatgcacacaaacacacccctatttgttagagcaatgaatactggtaaattacttactgttacctttggaggagaattaattgctaaggtaaaggccatttgtgtgaatgttttaaatgtgtctacaaataaaataatctgattgtataacacaagttttcctttcatcaggttaccttttcgacaaaatgattcatctagtcattgccagaagagtgggtctcctatttcctcagaagagcggcggcgcagggataagcagcatcttgatgacatcacagcagctcggcttctaccacttcaccatatgcccacgcagctgctctccatagaagaatccttggcacttcagaaacagcagaaacagaattatgaggtatttagagtattttttttcttgtctgtttgttgggtgctgcttacataagctagaatttactccaggttcaaggaggaaggaatggaatagaggggattaggtgcttccatgagctcagatctatgccactagttttcagagagtcacaaagttgctagaactgcaggaagtagctagagatgatcacagctaccttcaacattaaagtggtgatttgcctggagatgtggggagacttgtagaatttcatgtcttaaagctcatttacctgcctgttcctgttaggatagtagtagcatcgcatctctccctttcaccttgtaaaactcatgtgacagcttctcagtggcggactcaaacccagaccccttgttagagaatgaggagaatgtagttcccaggcttccatcttctgcagtacaggggagggcatagaaggagtgggaggataatgttgtgtagccagcagacagtgagacactgctttagagcataatctgcaggcccatgtgaagagagaaatatctcctgcttttggcagcttaatcaattttgcatagcactttgtttccatgtgttttgcattgaacttcaaacatgtatgttgagagtttgtatacagaataatgggatgggagaaaataagtgtgaaggaccataggggaacagaaaagtttagaagtatttagtaataattttagcctccaggagaacagtatcctgtctcacttcctaggtattgattagctagattttagtcaggtactagtgcaccaactagtataacaccagactgttcaggagttcgagaccagcgtgggcaacatagctagactccatctttaccaaaaaattagccgggcattggggcatgcaactgtggttccagctacctgtggggctgaggtaggaggattgcttgagctcaggaggtcgaggctgcagtgagccgcagtcacaccactgcactctgtatagcctgggtgacagagtgagaccctgtctcaaaaaaaaaaacaacaaaacaggctgttaatctgctttggcttttcataaaagccttggcatggattggcattatcaaggtgctctttttgaaaaaaaccatttttctttcagtgcattaaaatgactgtctagttatggctgtagcattgaggaagtgtttactgtctctgagctcttaaatgcctgtcctaagatatttttaggttgaattaaacccttcatctttaaattgtttttttttagcagagaagttgtagtggtaatagctcccacttttactgacccatattcatggcttgaagaggaggacatcaagaagttcaagaaagcatgagaaaagggaagaactgaattaggaatgacattgccacctaccatcagttggtggtaaagtccttgggagtttttaagtacattgccagtgtctgaaatttacttggactttttattggatactagttgctgtaggactttatttggagaggaatagtcagctttttagtattaatttcttgattttcattttgccattgaaatgtaattcccaagtctggaagtcatgattgtaattagggaagaaggtcctgtcagttgtagaaatctagacagcattagtccttctttttttttttttttttttttttttttttttttttttttgagacggagtcttgttctgtcacccaggctggagttcagtggcgcagtctcagctcactgcaagctccgcctcccgggttcacgccattcttgttcattcttgtgaacccgggaacacgccgggttcacaggcacccgccaccacgcccggctaattttttgtatatttagtagagacggggattcatcgtgttagccaggatggtctcgatctcctgacctcgtgatccgcctgcctcagcttcccaaagtgctgggattacaggcgtgagccactgcaccgggccccagcattagtcatttttgacatttgataggtcaaattgttatgtgagtgtgtatacatgtgcatgtgcccccatatttaacgcatctgtatttataagtattgtagtgctaagctcattactcagtttcttatatagaggagtgtatttcagtgcaatgttgtatattaatggaggtcagtaacttcaactgtagcaggctggtggctgtcagaagcattacccagttgtgtctgatagggcacagccatcaggcttgtattgcccaagggagcactcagtgaggtgtcagtgtccctcttattgctgattctaggtaacttcccattgaaaaattgtaaggaagagatgtgaacgtgtaactttgtgctttgctctttgttttaaaggagatgcaagcaaagctcgcagcgcaaaaattagctgaaagactgaatattaaaatgcggagttataatccagaaggggagtcttcagggagataccgagaagtaagggatgaagatgacgattggtcctctgatgaattctgaagataatctcctaaatcactgacgttgagatgtcatcatcttacatcagactttctaactagtatcaagatcagtgtcagatattgttgagggaagtaattttataaagttacacaaaggtagttataaaaaaagcccagtttgtctttcagaaggtgactttcatgtgcttgaaaagtttaatatttgaatattgtgtttaaccacatggtattaaaattttgcaatatattgtgtattggtctgatattttagtatatagtagaacatactttttttttctttaagccaaatgaaaagaggtaactttgcttttttcctttttcttacctatcaaatagcatttattacatgtctttcagtgaaatacttagttgttccaggcacctaaaatcaattaggaagacatagttcccttcttttttgggtaatgaagggagcagtctaaagaattgtatgcatgtttgcatggggttattgagacattggatgtgaaatacctaggaagacatgtatggagaatgcttaacaaatgctcttctcctttttctgtcttcccttaggaagaacgttatctctcttctgattaggaaggacttcccttttgagtagatgctggaaagtggaggttttttttgttggtttgtttgtttggttttgtgtttttttttgagatggggtcttgctctgtcgcccaggctggagtgcagtggcaggatctcggctcactgcaatctaggtggaggtctttttaaataacctcatgttacttcaggcaaatctggtacaggagaagcccaagctaactgagctgggtgaaggcttgtgcatcacctggcttgagttccttgctgtcacagatgataggttcatgtacacaacattaatgtttgataaggaaagcattttttttttgttaaaattgaattgtcagtactttacttttttccccccaaataggtatatatagactgcagaagcttcagtcccatatataaacgttcatgtcattttagaggattatatggttgtctccagagaaattaacttacattatcaaaaaattctttgtctaatatattggagtctttaaaagtgttgaagaataaaatattaattagaacaacttcaaatgctaaggtgatgttttaccgggacttaattaaatacaactttttcctttcgaaaaagactgttcacatttgcttccaggtgtaattattgctttcattccttacccccctcaagcaaatgtgaaaagtatactgacctaagattctcattagttttagttcttaaaacgaatagtaaatgatttcacagcgtaaaatttgatgttatttctggaagctggatgatatggaagagttcatgtgcctggacacacagttccctgtaatcctgccatctagggagataaactctgttaacattttgatgttgtgtttttgcttatttttctatgcatagttatgcatttatattctcaaaaatgaaatcataatgtacattgctttgtagtctgctctatatattgtcaatatgttcccatattaaatattttgctttttagacagctgtaggatattttatttcatgggtataccataactttaagatttatttcctattcagcaatttgattatgtattataatgtaatctgtaaatagtgatatgattaacatcttaatcacatccatagaaaatgacttatttccagaagataccgctctaaaaatgaaattgttaggtgaaagtgtttttgagaatttttatatatattactcactgcagagatcatgttcatttacattcccattagcaatatatccaatgctcagaattgaaaattactacttaaaatctttgcaaattgaataattacagaaaagggctacatttaaaatttgtatttgtttttcttacttagtgaaggttgtgttttttttcatattcattggccatgctatattcattcttttgagaattgctcattcatattttttctgttgcttgcttggagaatttgctctttttttggcatataagttcttaagaatgtccgtcctttgtcatatattgtaactttttttagccttatttgtcatttaacatagtttgtggtatttcagtatagaagttgttttctttaggagtctacctttgtgtatgtgcttgaaagtatttttgtaatccaagaatggataaatgtccttattttcttctagtattttcttatttcacttttacacctatctttaaaaggaatttaaattttgtttatatacattaactaaatcagtacaagtttggggtgaaaaggaaatttttaatccatctcaaatgtatttggttatattatataaggtagggatttgattttatttcgaagaatttaccaattggttcagtatgtgaaaccaccatttcccctctgattagtaatgctatttttatagaatattaaattcttatgtgtcttttgtgtcttaggccaatttctgggccttctgggttttttctacactgtcaataattatcgctttaattggtgttaatatttggtagtacacaggttctcccttgttcttttaaattttgtgaaatataacttacaaataagtacttaaaacagagcttaatgggtaaagcaacagctgtgtaatcacaaactagatgcagaggaggtcttgccagcactccaaaatctctgtgtgtcccctcttgacactcactgtttcccccagagctaactatcctgacgtatggtaattctccctctgtccttttaagaattattttaccagttatgtgtataacaatatggtttacattttgctcacttttgacttatataaaaatagaataatact

SEQ ID NO: 2 - DNA, 125639 bp, Homo sapiens; identical to SEQ ID NO: 1
  allele (1)..(125639): GRINL1A Variant Allele (rs11853270)

SEQ ID NO: 3 - DNA, 40104 bp, Homo sapiens
  allele (1)..(40104): HSD11B1 Reference Allele
acaattcagaggctgctgcctgcttaggaggttgtagaaagctctgtaggttctctctgtgtgtcctacaggagtcttcaggccagctccctgtcggatggcttttatgaaaaaatatctcctccccattctggggctcttcatggcctactactactattctgcaaacgaggaattcagaccaggtaagtacccatgcgtctcattttggaggaataggtttaaaaaacacaggggtgcttgagtgttcctgaggaccaagatgtgttcttgatcctcaaagttggtgaaaatgagggaaccctgagttaagatggtatttttgtgtcctccagctacaggctgtggacaggggggactgtgtaggaagggtaatcgtgtagccaaaatctagccaaataggccatgctttatttggcacccttaatggaaagcagtttcaaatcttctacaaaaatgagagtaatacccaaattcacaactcagcagctaattgggctctatgaagagactgataagtgggaggcaaaaaaaaaaaaaaaaaaaactggagatgatgactacatagaagtgagggaaaatccctggaatttctatgaacacatgtgttttgattccttgttaaatgtactttcaattgagcaaaattgaaagagtccagaaatgtctggaactccagcattttagctgaaccatgacttttctggcttcatcctatgatctctttccatggaggtttttagaaatgacagtagggaggctgtcagcccaaacctcccacttcagagcatgtttatgaaagacctggcctgttcccacagtgatttacggagtttgtgacaaactgatctgggctcataacctttaagttacaaattgcgataagcatgcctatatccagagagggagaaggaattttgctgccaacttgggtatggtcctcacttccttttggggttccccagagatgctccaaggaaagaaagtgattgtcacaggggccagcaaagggatcggaagagagatggcttatcatctggcgaagatgggagcccatgtggtggtgacagcgaggtcaaaagaaactctacagaaggtgagggttctatgctcgcagatatgtgtaccgtcacatgctcagatgtgttcttatatatgctcacatatacacagaagctagcatatcgcagatctatatacagaggcacatgcacacacacagacacttaattttgcactctcatatatagattcaaacaccaaaaaacccacaggaatataaaagtatgcatttaagcattcattcatgtgtgtgtgtgtaatatattctgcaacagagtccttgagttatatatgctcacagacatgcctagtcacacacatttacacatggaactacagatacatacggatgttttcaaaaactgaaatcccagtacctgcttatgaatacatatcctcatacccatgcagactcccagacacatgccctctcatggactcacaaacccaaggatgtacaaacattcacaaacctagagctacccacatagtaaccagcatctacactcataatgccctcagaaatgcctattcacagaagccatgagcataaatcatgaacttaaaccccagcactgggatgatttatccatttgaaccccaccaagttccagaaaatatttcagacagaggacgatgatcatgagggttatattaggcaacacacacacaaacatacttaccatttcttacctaaacagggctgtgagcaatctctcatttaagccccccgttacttcagagactaccccccaaaaatctgcagctaagactgatgccatttctgctgtatcactgcaggtggtatcccactgcctggagcttggagcagcctcagcacactacattgctggcaccatggaagacatgaccttcgcagagcaatttgttgcccaagcaggaaagctcatgggtgaggctgtttctcttacctcctcctctgaactttgcccttggggtcaccaagagcttttgggaggagaatgggaaaggtatcaaccccagatgatttcttaatatagccatctcttgcaggaggactagacatgctcattctcaaccacatcaccaacacttctttgaatctttttcatgatgatattcaccatgtgcgcaaaagcatggaagtcaacttcctcagttacgtggtcctgactgtagctgccttgcccatgctgaagcagagcaatggaagcattgttgtcgtctcctctctggctggtaagtgggacagggacatatgtggaaggtagaagaaaaaaaaaaatgccagggatgatgccaggctctgaagtagacataaatttttatcagtttccatgcagagaagtaatgagggattggtcaaggtaagtgggctacaaaattcttttaagtaacagagaaaaagcagtagctctgagtgctcattggaagactgaattgttttctacaaagtaaggtcaaagggacttgaggggctgctggaggtacagcctgtcctggtcctaagggagagacctagttacaatattaacttgaagttgaaatgttcatagtaatattaaacaaaagctgattaacagcttactcatatgcatgaatgggcagatgtactgataagagacttgtaggggggtgatttgtggactcaatgagaggcacgcatcctgagtaaaggagacactgttacaaactagtgacaccataaaaaatgaaggattggtcaaggtagatgggctacaaaattcttttaagtagcagagaaaaagcagtagttcagagtgcctattggaagcctgaattgttttctacaaaggaaggttgaagggacttgagaggctgctggaggtacagcttgtcctggtcctaagtgagagacctagtcacaatggataaaaaggactttgcttcctccatgaccaaaaggttggtgaagttatgtaaatgtgaaggtacaactgagaagttaactgttttaacaacacacaggtgtctgataagtgggctaagctaaagctaaataaaatgaacaacaagaaaaaaaaaaaagatgaacagacctgcctatagtgggtgtattctctaaaatttgaacatgttaacatgaaaagatcaatttaaacaaccagctgggtagggaggaaatgtgtccagagaaatggtcatgaaaagatatctgtgggatcaagagaggtccctggtgttctggatggtggtagcatcagaagccatcaccagtaaaaaaccagtgagttcccagcttgggacatttctaggcccatttttatcatagatccaggagacaagttccacacatctttgttgattagtcagttagaaggatgtggctggaaagtgcaaacaccaggatcaaaatccgccatctaaatgttgttcctggcaaaataaaaacaaataacctagaggactctgtaaactgttaagcacttcacaaacattcttattgaaactaatagcaccatctgtatcgtaaagagttctcctttctggcccagggacggcctgcatagtgattggataaaggggcagtgtgtctgtgctacccgccaaacagtgtgattgatatgcatcccggtgcttcccagacaacacacactccccacccctccccagacacagactctctctgggctggaagaaagggagagcttccagatgcatactgagtgggagggtgctgggcacatccccaatccatcccagggcattggacaaaatcctcacatcagtcatgatgtaggtggctttaatgatttcagctgattaaataatacattcactctaggcaaaggatgtatttcacctttgacgaatgtaactttctagaatgtacccatgatctaaatgtgctcagaaggactaagaattactgttgagcccaaggacgtgatgaaattctgataatctctgtttccccatatctcctacacttattgaatgacacttggtaatttccatgaactctgggaggtaggaaatctagctggatgagtatctttggtgtttattgcttgtgtagccaaaagattccagcttttttgccttgaaacctgtctatgaacttgcaaagtacagacacattgctgtcttgccgcaactgaagaatattctctgctttatgatgtattcttttaatcagtcagtaaacatgttcattaatccttcctctttaaaatctaaactctataaatatgggatgctaaacatcaagttgatcttaaggtcagccaaacagtactgggatggagttttaatcatttcttctagggaataccttaagttgtttattgagtttcagtgataaagaattgttttttctccacaatgcatttctgggtattgcattacatgggaatactatacttctaatatgttccttaaaggcttggttacctctgtagcattaacagagacaatactgctgcttctgggaacctccttgtagtccacatctatccactattcaccaccttttcttggcacctattgagcaagtttcttgtatgtgtaacatcccgttacattgattagcctcctctccttccaccacttgctagttaggatgtaagttcagctactgtaacgaagacccgaatttacaatggcttaagcaaatctaaatttatttatctcacacaaaacaccctggaaaggcagtccagggctgatatggtagttctgtcctatgaggctgtccaggaggccttctatctcagaaccaccattcctagagtgcttgtttacacctgcatgtccaagatggctcattggcatgtctgaattctaactcaagaaaatgaaaaaagaaggataccacctggaaggtgtacacttttcttctgccacagctggctgcaattgttatctttattcaaagggaacatgtgtccaactaaaaatcagaagttctatttgtgtaaaagacactgatattgataaacaactagcaatctctcccacatcacccatgctaaaaaacacataagactagaaaaaagtataccctccaggccatcccacatgtgaaacacacacacacacacacacacacacacacacacacaaaagactcattccctctcacattcaaggtccatcacaaaaaacaaagtccttccatccggcagtgcgtgcaggggacagtggggtaggagaaagaatggaaagagaatacctaaatagcatttgtgaaacaaaccaaagtagaaatattaatacttgaatatgactaaaaaaaatcactggagtgggcagagaacatttgaaaacatctggaaaaaagtttatctgacattagtcaaaataggtcatcttaggttcaatattagaaaagtaaagttggtttcattttcgggctcctgggcttggtgaatcccatcactgtggtgtgtgtcatcagttgcacacatggcagctagaactgagcatctaaggccatttctccacctgctttatgcccctgagaggaatcacggacaaaccctgtcttcctctgctcctttctcctctcaaaatctacttagccccctacctcctatgaagtctttttcagaactcaccagagccatttcaatgtttcttctttgtctttatctactatattttggtaagttaactttagaaatccaacttcctcatcatttctcttttttgggtttattggtaatccaaatactactaatactactcataactactaataacacaaatgttaaacatactcggcaagcatacgtgtagggatagtaatccttctggatcaaggaaaatgcaaggtatattttgaagtgaaactggacatcacaaaagactcagttgctttaaatattcaaaatgaaaatagatcagaaggaataaaagaaccttgtcaataacctttgaatcagacttctcttgagaagctccataagtgtctccagttaactattcacttttctccaagtaaatcttcttaaaaaatcaactttccctatatatagatagtcttattcaaatgtattcctttcctgttttactcattcgcagcattgtttcatactgttttttaatgtacgtgtgcagtctttcaggcactttgagttgagttgactagccgggggcaaacattcataagacagtgctctgtgggaaaactcaaaccaacagatgaagtcacttgctggatcttaacctatttgtcagtggaggtctgcctgtgtggtctaaatctatttcaaaaattcaacattatgaagtggggggagaaaaacaggtttttcaactacacatatcaactaacaggacttggaagacctataatgatgttttgcatagacaaggatatacagatgttaatgtcatccctgccttcagttctggcatacccactccttcctgaaaggtgggccaatgtttcaatgtatagctgtgcctcaggttattgggggtggggggatcccaaactccagattatgaacgggcctcagaaccagagtggaaaggggcaatttatcccttgccacagttgttctcatttttctaagaaaaaatgccgctttacccttaaatccaattacctcagaaataatcttcaggaaccaggatttctgaggtgagtggaagtgtttatccatgtgaacgtaagcatttacatgagggatggggagtggcgatggctgcacagggttgagctgtgtgttggggggatgggtagaagtacgcagaggtgaggtatgtgtttgtgtagacgtgtcatccatagggcctataagaatgccaagaaggagatcagagtaaaatcagcaacctgggcataaaaattccagaaaatttattctataaaatataatcattgttgtctaaatttaagagatcgtgtttgggcaacactgtgaggattgagacagaatctgctagatttatctaggaattcagttctgcatcagccccaaaaagaaaggagtgggggagatttgaaagggaggaagactctttgatgaagacagtgacaatttagtgcaggttgagaataatataatgctacccgtaatcattgttgcttcatgttcttttctggaaaggctcggctgaacttaggtagttgaggttacttatccctgctagaccacaggtttcattcaagtgcacttgtggatggaaatagcaaggttctaccatcatttgtatctttacgtttccttaccaaggagtttgagaaggcttacaacaaatacattctatttggaaaaacacaaatagaaaactaggtcttaagaaaaggagaatataaatgtgcccaaattagactcagtatagatcctgtgcttaagcttcaatattggcacttgaatttcttaacaataagaaaaagaaaagaaaaaggacaagatcagtgtacagccagcactctgcatgcctgggttctacatctgtggattcaaccaaatgtggatcaaaaaaaaatggggggaaataaattaacagagttctaataagcaaaacttgaatttgctacatgctgggtactatgttgaattcacagaaatgatataaggcataggcaccaaattaggtattataagtaatctaaagatgatttaaagtacacaggaggatgtgcataggtaatatgcaaatactacatcattttatatatgagggacttgagtatctatggatttgggtatccacagaagatcctggaaccaatccccctttgaatactgagagatgactgtactcagagtaggaaaaatgcatgattcttatattcatttaattgtttatttttgtgtattttttaaagtctaggtctttatttgtcattttgtctaaggtaatttggaaatatgtaccagaagccttaagaatgtttcctttggccaggcgcagtggtttacgcctgtaatcccagcactttgggaggccaaggcagacggatcacgaggtcaggcatttgagaccagcctggccaagatggcaaaagcccgtctctaccaaaaatacaaaaattagccgggcgaggtggtgggtgcctgtagtcccagctacttgggaggctgaggcaggagaatcgcttgaacctgggaggtggaggttgcagtgagccgagatcgcaccactgcactccagactggggcaatatagtgaaactccatctcaaaaaaaaagaatgtttcctttatttcacccagtctaagtgcaagaatatatcaaggaaatagctattaaattagtcacagatttaggtacaaaaacatttgttgtaggattttttaaattgcaaaacattggaagtaacctaaatgtctggcagtaggaaaataactagttgtactatatatttatatttatatctgtatctgtatccatagctgtatctatatctctggaaggacattttccaaaatattagcatgattatatctaaattacagaacaatgaatgatttttgtttttagcttcatatttttcttcattttccaaattttcattgtgtgtgtatgcatgcatgtgtaacttttataatcatagaaacatttcaataagttgttgggtgtgttgttttttccattgctttgtgcctcttttcataaccttttatgagaaattcatttcagaaattatttgcttcttgctgtgcttccttcttttaaatataatcatatacacacaccctcaatttcttcaatggattggttccaggacctcccacagataccaaaatccatggatgctcaagtcccttgtatgaaatggcatagtatctgcatataacttaggcacatcctcctggatactttaaatcctctctagatgacttataatacctaatacaatgtaaatgctatgtaaatagctgttatattgtattatttaaggaataatgacaagattttaaaagtgtgtatgtgttcaatacagacacaaaattatttcctgaatatttttaacccatggttgcttaaatccaaagacgcaaaatccatggatacagagggctgcctatattgatttccataagtagaaatttgcttaagtacttcaagaggaatggtcagggagagagagcataacttcatgtctgagaagtttattctataaacaaacttgaacaagtgcttcccaaatatactcattcattcattcattcaaaaaatatgcatgaaggtcaactctgagtcaggcactatgccagatgccaaggctatggcagggagcaagaaggccaaggcaagatacctgttgtgcacccacattctagtgtaagccaagttgttactgtattgtttatagttgtaaaaacaaacaaacaaacaaaaactagaaacaacctaagtagcaacaaacataaaacaaacactctaagggataaaaatcatgttacagatctattggaagggtttttatttcttggtatacaaaatagtagtatgttttacaactgcttgcctctgaaagctgttgaaatacagcattttactcacagtgattaggctgtgctctccttaaaggcaggcacattgttcattcatctctgattccctggagctaacaaattttgcaaataatcaacacattcttcttgaatgaacaaatgataaaatagcttgctagtacctggatttctggcttcatgtctttccttaaactgtgttggagactcacagtcatattttccctccatatttcctttctgtttctaggccttcgtgtcagggcttcttaataaggatactattggcctttggtgagggacaattcttcattgtgtgggactgtctgatgcattgtcgagcattttttagcatccttggctctgaataattcaatctaaaagccactcatagaggccaagcaagataggcatcttcaccggggaggaaggtggcagcacagattgaaaaacttgagcaggatgggacaggtttgtgtcacagagcaggtttgggacatcagagactgagtgagatgaggatggcatcctcacatggggcagcagtggtggcctagtgtgaagtttcagagcctaagtgggccaaggaggctcttcatgtggcacctggcacagggcatcagaactaaggggagtgatgagagcatctgcaagagggcctgccatgggcagcccgacatagggtaaagaaggcattcaccaggcattcatgtagcctggcactggggtgtcagaacctaggtgggatgaagaggccaaatgaagaatgatcacatacaggagcattaatcacataagtaatacatattgcagatcttggaagccccaggttctcactatcaatgttacaaatatgaaaaggaagaaaatgagaatgaatcctctagtgttggattgcaattggaagtgtgggtatgaattaatagttgtttaatacacaaggacagatatataaatatagatgtgtgtctacatatacatgcatgtattcactcactctgtccactgacaggacctgggagcacacttggtgcccagatcttgttttctaaatatcattctccactaaaaaaaaaaacaacaacaacaaaccaccaaggcttcttagagaaatgactgattccagggcagtggcaagaaaggtacaagataagcctgaaaatcttgttctgccagtaagtacagaactgctcaaaggataataggcacacattaccaggacacagaggccaactttaaagggatcccactagccaaacctagaaccattgaggcatcaaaacaaatagtagtaacagattatcacccattgcaacaataggaaataagtccatgaagtcataaataaatgcatgaataaataaatcaagagaggggaaggatttttcatgaagtggaaagccaactgatatgaaatgatgaacttagaaaatcaccatttggtaaccataattgtaataattcagccaggaagcaacaaaggatgctaaaagtagtgggtaaaagttaaacaaggaagacggtatttacatagtctcaaagtactaccctgtgcaacaacaaccaaaaacaccacaaatgacctgattcaaaaatgggcaaaggatatatgacagacccacagctaacatcatactgaatggggaaaaactggaaacctttcctctaataattggaactaaacaaggatgcccactttcaccactcttattcaacacagtacgagaagtcctagccagggcaatcaggcaagagaaagaaataaaagacatccaaactagaaaacaggaagtcaaattttcactcattcacatgacatgattttataatcagaaaagcctaaacgctccacaaaaaaactcttataactgataaacaagttcagtaaagttgcagtatacaaaatcaacatacaaaaatcaacagtgtccccatatgctaacagcgatcaatctgaaaaaaagaaaaaccatttacaatagctacagaaaaaaaaaaaccacctaggaataaatttaaccgaggaggtgaaagacctctacaggaaaaactataaaacacccattaaagaaatggaaaaggacacaaacaaatggaaatatatcccatgctcatggattagaataattaatgttgttaacatgaccataataccaagagcaatctatagattcagtgcaattcctatcaaaataccaatgacatttttcatagaaatagaaaaaaaaaacctaaaatttgtagggacgaaatagccaaagcaatcctaagcaaaaagaacaaaactgcaagtaatacattacctgacttgaaaatatattaaaggctatagtaaccaaaacagcatggtattggtaggaaaatagacaaaacaatggacaagaatagagaacccagaaataaaccgatgtattcacagccaagtgattttcaacaaaggcaccaagaacatgcattggggaaaggacagtctcttcaataaatggtgctggaaaaactgaatattcatatgcagaagaatgaaactagatctctatctctcaccatatacaaaaattgatgcccaacagattaaagacttaaatgtaagacctgaaactatgaaaccagaagaaaatgtagggagaacattccatgacattggtctaggcaaatattttatgactaagaccccaaaagcacaggcaaaaacaaaaatagacaaagaggactatattaaactaaaaaccttcagcatagaaaaggaaacaatcaacagagtgaaaagaccacctgtttaacgggagaaaatatttgcaaaatattcatgcgacaaggactaatatccagaatatacaaggtactcaaataactcaataggaaaaaaaactatctgattttaaaaatgggcaaaagacctgaacagacatctctcaaaaaaagacatagaacatataaatggttaacaagtatatgaaaaatgctcagcatcactaatcattaagaaaatgcaaattaaaactactatgagatatcatcttatcaaattgctattatcagaaagacaaaacatagcagatactattgtggatgcagagaaaagggaactcttatatactgttagtgggaatgtaaattattacagtcactatagaaaatagtttggagatttctcaaaaaactaaaaatagaactatcatatgatccagcaatcctgttattgggtatttatcaaagagaaagaaaattggccaggtgaaatggatcatgcctctaatcccagcactttgggaggccaaggtggacagatcacttgaggtcaggagttaaagaccagcctggccaacatggtgaaaccccacctctactaaaaatacaaaaattagccaggcttggtggcctatgcctgtaatcccagctacttgggattatagctacttgggaggctgagacaggagaatcacttgaacccaggaggcagaggttgcagtgagccaagatagcaccactgcactccagcctgggagacagggttagactccatctcaaaaaaaaaaaaaaaaaaaaaaggaaatcaatatatcaaagagatatatgcaactccagtcatttgcagtaatgtggatggaactgaaagtcattatgctaaatgaaataagtcagacacagaaaaacaaacactgcatgtactcactcatatgagggaactaaaaaggtttatctcatgaaggtagagagtagaatgatagtttacagagactgggaagaatgtcagcgtgttggcaggagggtgaagaggggttggctactgattacaaatatgcagttagaaggaataatttctaatgttcgatagtagagtgactatagttagtaactatgtattgtacatttcaaaataagtgaggacttgaaatgttctcaacacagaaataataaatgcttgtgatgatggatatcctaaatacccttacttgatcattacatattctatggatgtaacagaatatcacatactacccataactatatacaaatattacgtatcaacttaaatttttaaaaaaatttaatgggcaaaggacttgaataaacattttaccaaagaagacaaacaagtggccagtgagcacatgaagagatgctaaacatcattaatcattagggaaatgcaaattgaaactacaatgagataccacctcacagcactaggatggctactatcccccacacccccaaaaaacagaaatagcaagtattggtgagaatgtggggaaattggaatgctgtgtactgttgatgggaatgtaaaatggtacagtcactatgaaaaacagtatggcagtacctcagaaaatttaaaatagaattatcatgtgatccagccattctatttctgggtatatacacagaagaattgaaagcaggaggccgggtgtggtggctcatgcctgtaatcccaaggtgggcagattacctgaggtcaggagtttgagaccagcctggccaatatggtgaaaccctgtctctactaaaaatacaaaaattagctgggcatggtggcaggtgcctgtaatcccagcttctcaggaggctgagacaggagaatcacttgaacccgggaggcggaggttgcagtgagccaagatcatgccactgcactccaggctgggtgacacagtgagactccatctcaaaaaaaaaaaaaaaaaggaaagaaaagaaaagaaagcagggtctcaaagagctacttgtatatccatgttcacaggaacagtatttgtaatagcaaaaacactgtatgtttcactgttagcaacccaagtgtctatcagtagatgaatggataagcaaaatgtagtacgtatatacaatggaatattattcaatctttaaaaggaaagaaattctgacacatgctacaacatggctggaccttgaggacatcatgcaaagggaaataagccagccacagaaagagaatgaaccctctggtattggtttgcaattggaggaaactgtatgattccacttacgtgaagttcttagagtggtgaaagttatacaaagttgaaagtagaagggtggttgccaggggctgggaaaggagagaatgtggagttattgtttaatgggtgtagttagttttgctacatgaaaagagttctggagatggatggtggtgatggttgcacagtaatatgaatgtactgaatgcccccgaactgtccgcttaaaaatggttaagataggccccggcgtgtgatgttcctctcccagtgtccatgtactctcattgttcaactcccacttatgagtgagaacgcgcaatgtttgagtccttgtgatggtttgctgagaatgatggtttccagcttcatccaagtccctgcaaaggacatgaactcatccttttttatggcttcatagtattccatggtgtatatgtgccacatttgcttaatccactctatcattgatggacatttgaattggttccaagtctttcctattgtgaatagtgccacaataaacatatgtgtgcatgtgtctttatagcatgatttataatcctttgggtatatacccagtaatgggattgctgggtcaaatggtatttctagttctagattggctgggggaaggacagcatcaggagaaatacctaatgtaaatgatgagttaatggatgcagcaaaccaacatggcacatgtgtacctatgtaacaaacctgcatgtcatgcacacgtaccccagaacttaaagtataatttaaaaaatggttaagatagttttttttaagtaccacccgaaaaacaaacttactgattatgacagggaaaagagtaattttacagaagagaaacctgatagacggcacctgattcaaatgatcatggtttattaacatcaccagtaatggaataaattgaaaacatgtatcatttgatggggtgcaacgtgaagaacaaaagttacttttgtgaacctgccaaaatgcataacctgaatcaaatcatgaggaaacaccggataaatccaaactgagggacatccatcaatagcgcgctggtaaatgtttaacaacaagctatccagaaaggaagaatcaaaagccctgatttgtagcctttccatgtaatcaacactcccatgatgaccatatccacatgacattctcttgcttgcaaaatttataaacatttaaccaccagctctcacaatctagtatgagccagcttcggcatatcagcttgtacaaaataactggctgtactctccaacagtgccaaggtcatgaaaataaaggaaagactgcagaatcattgcagagcaaaggcaactgaagagtcatgacaactaaatgccaactcatgatcctcaattggatccttttgctataaaggatattattggcacacatgacaaaatttgaatagggtctgtggattagataacatggatatgtcagtattactgtactgggttgaatagtggccccaaaaaagatatatctacatcctacctgcctgaacctgtgaatgcaaccttatttggacaaagggtccttgcagatgtagttaagttaaggatcttgtgatgagatcatcctggattagccaagtgggctcttaatccactgccaaatgtccttatagagtcaggggaagagaagacacagacagagagaagaaaaagccatgtaaagatggaaagtagagattgtgatgtagccacaaggaatgccggcagccactagaagctggaagaggcaaggaagcactctccctcagagtctttggggggaatgcggccctgccaacacattgatttcagacttcttgactccagcactgtgagagaataaatttctgttgtcttaagccacccagtttgtggtaatttgttatgacagccctaggaaactaataaattccctcattttgatgactgtattgtgattatgtaggacagtgtccctctgtgtaagaaatgaacactaagtatttgggggagatgggacatgaggtcagcaatgacctcaattacagctattaccctcaaatggctcagcagaaaaaaaaaataggttgtgtgtactattcttgcaacttttctttaagtttgaaattatttcaaaagcaaaaaaaaaaaaaaaaaatccccatcctgggagtctagtgacttggaggacatatgaaagtgaattctgtggggctttttctgggttcttcagagatcccctgcaggagacaccactgctgccgcccattccccctgcagttccctttgtgtgagcaatgccttctctagctcattattttcagttcagctttcttctcagttcctaggcttcaatcagcccagcccacttggcccagtctacccaaccatccctgggcaggtgactcctgggcagcccccatccacaggatccacactgggcctctgggaagccaatccttggactacatggttgatcccacaatgcactcagctttgttctcaagcaagggcacttccagccctccctgttgcctttagactttagatgtgagtcaaattccagtccctgaactccaggggacatattaaaagttctccaaataatgctattgaggcccctctcatatggcttaagtggaaagggatgaaactgccctgagcgtcggtggatatagacacaggacattgagaactatctcttatccaagggtgatttaggctaggcacgggtgattaggcaatgcaggcagaaccggtttgggcccacccttcaactgtggatgttcttcaaatctattcttttattcttgccttagaagatgtgctgatactctgagactttaggaagaactccatttcatatcctgtcaacaggccccatacctgcatagaaatattcttgccaaagtcaccttgtgaaatttagtaaaagttttatcttatttatctctgttacatttttgtgctgtttcaacaccaaacgctctttcctagtgatcagccaaaactttgccctgggttttctctggccaccttaactctcccctctcagtctcttaggtttcttggcaattctccaaccttaattgttggtttcctgaggatttttctatcctgaaccctcttctcttttcactcaacacactttccctggataaatccattcattccatttcttcaagaatcactggattgtgggatgtctcaatacttatgatgacacctcaggtcttctggggtatggagaagataggtggatttatcttgagagcccaactcaatccaaacaactaaagagtttagaccatgagggtctcaactgaggaaggatttttaggaagagctgggaaaaatggggggcaggatcccagatgactctctggccttgaagccatttaggcctgatgcacctcaaatttgggctcattcatttgcctggggttgctctaaaagtgtgaaggcaggcaggaatgaagtttttcaatccttgtgcactcccctctgagcaatcaattaaagcagtctaaaatccatctttgaattggtaatcatttcaaaatctcagcaaggcagttagggatggagggtagagaggggatgaacgaaagcatgtaggcctccttttgacctcttctactcagctaataagcctcagtgcatggcttctttgccagttctctggctcttgctgtttctacagtggctgagtccccgcatttctgggacagagctaattacaaacattctgtcccacctatcatcatgtctgccttcatccttctaagactctgtgtcccatattttgcttcagaaaatatagtcaccatagctctgtttctttgtgttctaaaacttcccagaaagctagctgccatctttctcttctgctatcatggacccaccctcccacataagccaaaacttaaccttgggtagaaacactcaggcttccgaccccctcaattccacgactgcttcatgcatattagaacagtatatttatttacttactaattttgttgagcacatacactggcacattttttaaaaaaaactggcagtctaacaagtggatctcatagggtgcaatcagaaaacaagttgattctttcctccccctgcctgttcaaacctgttctgtgcgcaggtcctccctgagcctggacatgagctagggcagatggcaacacttttctggttactccaggttaataaaaaatcctatggctgcctctagtccacagaacagtctcatttccaaataggtaagatgtctagtcatgtgcaatttaacttttaccaaagcttctccccttgctaagctggaacctgctgttggtaggaaatgtgtttgttctttcctctctttccccacctcctccccactccctgaccccctctagcctgtcttgggttaaaggaaaagggacaatgcagggaagaggataaggagtaggaaaggtcttatttggctggcacccagctaatatattggtcttctcttgacattcagaactcatgctctctgaccatttggtggatgatcaaatctgactcttgcattgcatgcttttgtggattctttggaggccctttctggaatactagttattcttcttgtggtttgggcagcagttgcttatgttatttcctttgggccctgggaatacagtgggaatacaagagaatacactcaccacttcaggctgtccttttgggcagaattggaaatggctccagaagagaagggatgagtcctgggacaaggcccacagggtggtgagcagagtgtgggctggatttcaggtccacctacaagggagagtttccataggtgtgacacaatttgggctatgcaatggctttgcccatagccatggcctctcagattgagtcagaccccagtcctccttgttgctcatcaaactctttgggacgagctctctgaggtctctttgaagtcactctcacaaagactgacgtgaggaaaatcccccaccccttctttttggaagatcaatgagacattgctaatttcttctccctaactcctatcttctctggcctcccagtgtcagcccctttatttccttgggatgtttgtttgtgtttccatgttccctgtaagtgcacaggtggtctggaacctcccttcagaacgtggaagcctttgccaattactgtgatgttctcagcctttgaacctcagctgaaatgaaagcagaaaaagtcaaattttaacatcctgttacatgttgtttactccactttgaccaggccttttgactcatggaatcttttttaaaaaataaaaatctagatttttagagggattttgcccttttcagctttctgaaacttctaaatatggtttacatagagcagaacataggggtttcctcacacaagctaattagcattatgtggaaaaatgtttaagaacacacttgtgaatagaaataggctttaattaaatgcaccaatgttgtttgagaatggaagatttttctctcttctcttcattttttttctgctttttaatttttaatatatgttccagctttcctttagtgggcctagactggttcacaatccttatctgcaattccaaaatccaaaaagctatgggaaaaaaatggaaacaataataaaactccaaaaactaaggattttcttttcataattaaatctacctaatgaatttaacctgaactgaagtgaggctacttaaatcctttctttatctcagtatgaactttccaatattttagtgcagaaataatacatgctgtcttacaggctgcctcctccaaccctactggagatgcgatgtaatacctattaatgcccataccaccatcaaaaatccaaaaacaaattaaaattccataatacatctggctctaagagttttggataagtgtttttaagtctgtacttttgtaaaagaaaaaatacaataaactttgctattattttccttgtctgactagcttctcactgcctatctaactcctgcctctaatttttgtacaagccattcttccacctccctggtccttcatgtacttcctttcatcaagcagaatttacaacctacctcctccaggtggagtttcctgatagtccaatatcattctttacctaaacatccagtttggatttgaaatacatgttttccttagtcatgccagtttgggttttaaagagacttaattcataattcagtgactgctcacccagctgtcattgtgggactttagcctcttccaaagacctctccccatttctttcaggagttcctagatgatgttcaacaagcttaggccaccatgcctttcctaccccacactcattctcaaaacccactatgaatatcatttatggataaagccactctttcctactgaacagtttagcacagtcctctactccataaacagactagaagaatggggggcagagctcaaatctgcaggttaatggtccttatttgcacatggtccttacgtgcattgaatttgagtactggcttaaacatttacagatcaatagcaggtcacaaaatctgagagatgtcaacaacagctgtagccatatgttattatgttacagtgcacctcatgcatagtcttcacaataaaggctaatcgtttttcagtagtctttgtccaaccttatatgcttgcataatagttcatttttttcaccaattaaaagcaggcggatcacgaggtcaagagatcaagaccatcctggccaacacagtaaagccccatctctactaaaaacacaaaaattagccaggcatagtggcacatgcctgtagtcccagctactcaggaggctgaggcaggagaatcacttgaacccgggaggcgtaggttgcagtgagccaagatcgcgccactgcactccaacctggcaacagaatgagactccgtaaaaaaaaaaaaaaaaaaaaaaaaaaaaccaaaaatattttttaggcttggcacagtggctcatgcctataatcccagtattttgggaggccaaggcaggaggatcacttgatgccagggattttaggccagcctgtgcaacatagtaagacgttgtctctacaaaaaattaaaaataaattagccaagcacagtggcatgcatctgtaatcccagcaactcaggaggctggggtgggaggatgagctatgatctcaacactgtgctttagcacttcagcctgcgtgggtgacagagtgagaccctgtttctaacaacaacaaaaaaaaaacttttttaaaccatacaagcatccatgtcatgaatttttcaggtggtcttctgacatgtctggctccttcactacttctctcctttcttctgctttcactttctctcttctcttacctccttctcctacaaaaccatttaggattcttctatgtaccttgagcataacctgaggcataactaaggataggcaatgtgatgcatgagctccataagtggtataaaaataactgctctaggaattcagactatggcttcgcaggatatcttgcttctgtatctctgttgccacctagacaaacacattaaatgtcatagtcaatatctttattgtcatctaggggtgtgtagtgggctgaatggtggtcctcccccaaaagatatatccacctagatcctgtgaacgtgaccttaagtggacacatagaaagtccttgaggatgtaactaagatctcaagatgaaatcattcccgattatctgagaggccctgaatccaatgacaagtaaccttatatgaagagtaaaagacacagacagaagagaagaaagtgatgtgaagatggaggcagagactggagttgccagcacaactcagctccaactgccagcagacattagaagctagaagagaaaaaagaaggattccctgctataggttttggggggagcatggctgtgctgataacttggttttggacttctggattccagttctgtaagagaacacatttctgtagtcttacgctaccaagtttgtggtaatttgttatggcagcccagggaaatgaatacaaagggactaggagtgactagccctgtttatttatgggtatcctcatctgtcagcttagaagtgaaaataatactgctattcataaattttgcctattttggactcgactatcaaaagagagagaatcctcaccaatgcagaaagaactggatttaacacatggctcctggaaaacactcatataaagaacagtgccttctgtagaggaagtaccacctagtgttcaagagtgtgggccactagagtcaaatttgaatcctggtttgaatcctgcttctcccactcattaaccttgaaactttgagcatttatcctttagattctacactggcacataagagctaaataaatgttagttcctatttagctcaatttcagaggttattgtgtttgctccatatgcttgcttatttttgcagaatacttgtctccgcttacttatccctctccatggctgaaatggctaccccagtcccaaccttacatgaccttttcattcaaaatccaacagcagcaatcagaatcttttggtcacttatttcaatttattgaaagagagaccacgatgtgtgttcaagccagtgtgcatattcgtgataactgggccaaccttccatggctagaaagataaaggctctttgaaggggatgagggcaggaagtccatggcaagcatttctagtacactgtagcttttcacattttatatattccaacctatttatgtcttccttcatagtatatgcctccaatttcatgctttaaaaagtatctctaactttgagattagaaattcaccaatagcttattttagttttttactttccacatatactctgtgatctaatttgaatttgtttattagaatggcacttttttctccaagtaactagctatttgtcccaacatgattttttgaatagctcatacttttctcaccaatttgaatactaatactgctaacaataatagcattttctgaatgctttctatgtgccagagtttgtgctaagtatattacatgggttacttcagcttggttatattattatccacatattacagctaagaattggcatacttgggattcacacctgggtcatctgactctagagctcatacttttaattattatgctattctgataagtaatgtggatctatttttgtctcaaacaataaggaaaattattgacataactggaagtccagatgtagggcaggcttcacagttgacttggctgaagctcagtgtccccgtgattctcttggctctgctctcttccatgtgtggcttcatcctcaggctgacaatgagatagctgcagcaattccagcccccatatcaatgcacaaaaaatgtgttggaagaaaaagaggattgctactctcagaaactcttccagaaaaacaataactttttgagacactccaacaaaattttcttcaaatctcattggtccaaaatgagccacatggccattcctgtatcaatcatgagtaagaagaatgggataaaatagattacataagctcatacctgcagttaggaatgatgtcagctttcttttggcacatgggctgcatagaagtgaggataactatcaataagaagtaagtccagctctcagatacagaaaacctaaaataatagtggattcaataagttagcatttaggccaggcatagtggctcatgcctgtaatcccaatactttgggaggccgaggcaggtggatcacttgagatcaggagttcaagaccagcctggccaacatggtgaaaccctgtttctactaaaaatacaaaaattagccaggtttggtagctcaaacctgtaatcccagctactcgggaggttgaggcagaagaatcactagaacttgggaggcaaaagttgcagtgagccgagatcatgccattgcactccagcctgggcaacagagcaagactctgcctcggaaaacacacacacacacacacacacacacacacaagtaagttaaaatttaaatcaggtctgaaggtaggcagtatagggccagtatagtatggcagctccatggtcacccaggttccttccttctatctaaactatctaaatgttttgccatcctcaacacgtggcttctacctcatggtccaagataggtctggagccatagccattacatccaccttcagacaccaagaaggacaaaggattgggaaggagagactggcttctccttttaaggatgtgtcccaacattgaaaccaaaactaaagatacaacaaaaaagagaaaaccacaggccaatatccctgatgaacacagatgcaaaaatcctcaacaaaatactagcaaacagagctcaacaacattttaaaggatcattcattatgatcaagtaggattcatcttcaagatgcaaggatggttcaacataagcaaatcaataaatgtgatacatcacatcaacagaatcaaaggcaaaaatatataatcatttcagtagatgatgaaaaagcatttggtaaaatgcaatatcccttcataataaaaaccctcaacaaattgggtatagaagggatatacctcaacatcataaaggccatacatgacaaacctatagctaatatcttactgaactggacaaaattgaaagcctttccaccaagatttggaccaagacaatgatgccaacttccaccacttttattcaacgtagtactggaagttctagccagagcaattagacaagagaaagaaataaagggtatcccagttgaaaagaaagaagtcaaaaacctcactgcaacttaacaaagagagattccttcttctcaggtaatagtttagggctgcttttggtggacttacatgacgtcttcaagaatccaaggtcattccacatttctgttccactataattaacattagcttttcctaaagttcacaaactgactgctacaattctagccatcatatctgaggttccttaggaggaaaggagaagggcaaaatgtaaaagttgcatgccacctgaatccatctaatttattggaaatcaatatctttcctagaaacctcatctgttagatttctcattgaccagaactattacgttgcatggcctattacggcaagaaaatctcagggagatgagcattttaaaatgattacgttgctgtcctgaacaaaatcagactctattattaaagaaggaggaatggatattgggtagataacactatttactatcattttccatctagaatattttttgctatatgacataaaacaaagagttaattttttccaataagttaaccacctttctcagcatctttattaaataacccatcctttcttcattggtttgacatacaacatattatatttgaaacatatagaaattccaattccgataactgcaagagtggcacccgaaagaccatccttccccagattacaactataagcttttgacaaaatatcgacgacaaccattgaaagcactggagattaaccaagagcagatagaaaatggagggttattgacacttggaagaaggaaatgacagtaggcgagtttctcaattgtatagctttaggcctaagggcaaccccaatcagtgccatatctgggatagaaacctgccatcttgccaacatgaatagctagaaggaagaggttggggttaccgtaatagctggaatgcaaaggggttatgctggaaaggagagtcacagtggagaaacactgaatcctatacataagctctgtccaaatctctagttgttctctgaacaatgcatgggcaatgcagaaaccaagcagccaagttaagattcaaataattgaacagagattgcagctgatacttattacaagagacagagtttcacccaagttaactggccacttaaaaaaaaaaatcaacactctttggaggaatgtgacagaatccaggtaccctgcaatgtatcattcacgatatccaggatacaatacaaaattaacacccatacaagaatagtaaatatgacccatacttaggaggaaaggaaatcaataaagatcaatcttaaaattacccaaattctggaattagcagacaatggattttaaagtagttgctataacaatgctcggtaaagactatagggtctcaggtcacttctactctcccctcctaaaaagggtattaataatagtttatcctattaggcatatgtccacatatcctccaaacaacttgagtgagaattaaccagtctggtgaacattttttttaaaaagcggctttgggtagaaaagcaaagacaggattctgttttttgtttttttgagatggagtctctctctgtcacccaagctgcagtgcggtggcgcgatctcagctcactgcaacttccgcctcccaaattcaagcgattcacctgcctcagcctcccgagtagctaggactacaggcatgtgcccagctaatgtttgtatttttagtagagatggggtttcatcatgttagtcaggctggtctcgaactcctgacttcaagtgatctgcccacctcggcctcccaaagtgctgagattataggtgtgagccaccacacctggccaggacaggcagttttttaatacctttgtaaggaaagtaaaacataccctttccattgccaacaggtcaccaagttggcagagataactagtcaaactcttggatccccagcacttggttcagagatgcaagagttagcagctgtggaattacatggctcttttgtagcccagcttgtttatcacccttactaaaagcttaaacagtccctcttcaatgaaggctgtcctgcagcccaatcccaccctatgccttcgataccttaatgttttcaaaattcaacacagcagtataacttccatggggaatatagagaaactaagactcaaaggggtaaaaggacaccataggagttacaaagcctactacagctctgtaagaaggtgaaatgggcagccttattaacccatttctttaatctgtcatttagggaaagtggcttatccaatggttgctgcctattctgcaagcaagtttgctttggatgggttcttctcctccatcagaaaggaatattcagtgtccagggtcaatgtatcaatcactctctgtgttcttggcctcatagacacaggtaaggtcaatactttgtgtttttttttaattattatactttaagttctagggtacatgtgcagaacatgcaggtttgttacatatgtatgcatgtgccatgttggtgtgctgcacccattaactcgtcacttacattaggtatatctcctaatgctatccctcccccttccccccacccaacaggcccagtgtgtgatgtcccccttcctgtgtccaagtgttctcattgttcaattcccacctatgagtgagaacatgcgatgtttggttttttaatactctgaataatgacctgcagatgaactgtctgccttaccattgtggataaacaagggtgctgaactccctgacctcatgtgtaatgcactaaaaacaaaccagtgcagaaagcactagctctctcatttaaaggcatttctgtcactagtggaggctctggctactctttgactctcctttccattttgattaccaaggtggctgagtctcaccacattcatcacttaaccctttgctgaacaccttatgtcctcatggacactcaatggccattacgtttctatatgagacttatcaaaatacaagtttgtgtttcttaaaagcagcaccagtaataagacacactggtatcatgaactctttgatgtgatgttctgagaagaacacaacatcattttggtggtgttcttgccaaaatacatgaccccactccaatcataagagaacaatgaacaaaaccaaatcaaggaacattttataaaacatttggtcagtattcttcaaaagtgtcaaggccatcagagacaaggaaaggctgaagaactgtcacagattggaagaaaaatgggaagaaattactactaagtggaatcctggataagatccaggaacataaaaagaacattagtgaaaaaataaggtctgtagtttagttaatatattgtatcaattctattattatacctgtcctaaatcattgcacaatggttatatatggtgttgcaaccagggggagcaggtgtggaatataagggggtacggcctacaatttttacaacttttctgttaagtccaaatacaagtttatctaaaacatgtggcagatattaaaagaaaatgctctttgaagagtaattgagcaacagttagagaaatagagagagagaccgagacccagggggaaacaagaaaggaatggagagagagagagaagttgtgcaagatggacatgaaaacttggaaggggagagaagtgaaagtggtgacaagggagcaaaagcctgtattcttgtgtatctcttccttttacaagacagtaagtcattatcatacagcactctggtttttcccactggcacttcccattagctactgagtcattatgagacttctatcctcattctgctcccccatattacttctccgcctccaaccaaaatacccaagagagaagcatgattcagatctcccaagtaatcacctctaactgctcccaccaatctccatccaggaaggcaaggcccctattaacactaaggcctctctttgcccaacagactctaacatacccagtctctccatgtattccctatagtgcctgtgaggcttgcagagcaaacactgccaaaagcccctgacagctaagtggttgatgtctccaggccttccatcatgtagactgtcctagtcagataaccctactcttcccttgtcattctatagaaacagccatgaaggcagtttctgggatagtccatatgcaagcagctccaaaggaggaatgtgccctggagatcatcaaagggggagctctgcgccaagaagaagtgtattatgacagctcactctggaccactcttctgatcagaaatccatgcaggaagatcctggaatttctctactcaacgagctataatatggacagattcataaacaagtaggaactccctgagggctgggcatgctgagggattttgggactgttctgtctcatgtttatctgagctcttatctatgaagacatcttcccagagtgtccccagagacatgcaagtcatgggtcacacctgacaaatggaaggagttcctctaacatttgcaaaatggaaatgtaataataatgaatgtcatgcaccgctgcagccagcagttgtaaaattgttagtaaacataggtataattaccagatagttatattaaatttatatcttatatataataatatgtgatgattaatacaatattaattataataaaggtcacataaactttataaattcataactggtagctataacttgagcttattcaggatggtttctttaaaaccataaactgtacaaatgaaatttttcaatatttgtttcttattttgtggtctgaactctttatctcttcctgagtggaagaaatcaccctaatctttgtttggtggggaatattgtgtctttaccttttctgtgtatttctgatattcttcatattattgcatattgctcctctgggaaagaagacacctaggcataaggaactagggcaaacccaggaaaatggaggtcccagaaacttgagccacagacccaatgcccatttactgctctcagaggacatcaagcatctgtactttacatgtgaacactaaactctgcattggaagtttggagagggggagttggagttcaaatcctgccactcactcatttagacatttactcattcaacaaatatttagtaagcacttattaggcatcacctaactatgattaaatgggaaacaaaacatcagcatgatgaacaactcagcaaagccctatattgatcagggcccaagaagtaagagatgacaccctcaaattgggtaattttagtagcatttaataaaaaaaggggcaaggcacagggaaatcacaaaagatagtgatatctcagggttagttgcagctgtttccatcgtaaggcccacagggacaagagaagagacctgttaccaaaacctcaagatgtgaagacctgtatggagagcaccacatggcaggagctgtaacatttagttaagagatgcagccaaccagccaggcgctgtggctcacgcctgtaatcctagcactttgggaagctgaggtgggtggatcacgaggtcaagagattcagaccatcctgaccaacatgggggaaccccgtctctactaaaaatgcaaaaattagctaggtgtggtggtgcacacctgtagtcccagctacttgggaagctgaggcaggataattgcttgaacctgggaggcagaggttgcagtgagctgagactgtgccactgcactccagcctggcgccagagcgagactccatttcaaaaaaaaagagatgcagctagcctaccaaggattgtgaaggaggtgtctaggggaaaaaacaccctagcctcacctcacgctcttccctccctctgatctctggccagcatttcacattagctgaacagaggggcaagggagcagataggtatagaccatacaggtcagcttccccatgtacagagcagatggaaaagggtagagagtgttctggagaaatgaatggagtatatccatcaggaaccccaacactcccaaacatacagcttccatggtaagtaatgctgggacatgagacatgtgcctaaaagtgcaggggaaattttcttttcccacctctgaatctaaatggctgggcagcagaacatattggaatctattgagcctgccagccacatggacaaagggctggatttgagcctgctaatgtggctgcacttttcttagaggtccttccaaggctatgctcagtgcaagggagcaggagagacctggctgcatccatgtgcaaaaacaagacaaaacaaaaagggccaaaaaatgtagtctggtttctgacatgaaatgcacccacacttgcaacgtggcttaatatatgtcctggtttctgatcaatcagattaacacccttcagtctcttgtagaaatgagactccttcttcacagtgagatgaagtgaagtaattcctttactcaagggtagagataatattaaagctgagttagaatttgcttggggagaggttaaacctctttctaaatgagactttcttcagaatccaaaggggaagatctcaaaaagtaggtctgagaactgaaaccatctacacccacatagcttattgtcttcattaacatgattttaacattccattctctttatcagcatgactttactattccaagaaactcttgtccgagaagataaatgttgcaagcccatttaaaagtgctgaatttttcaacagatagcatcaaatgactgctactctttaagactgcttggaacccttagttccaaaccccagcttcattgtgttcaccagtctccagctatggcatcacaatccttatccaattcaaataaagtcaccatgctgaagtctcgccttaacctagacttcaaagccccataaagaccctgactttaccctctccactctcagagtctactaagactccatcaagactccagctttgccttatcaacaggttgttttggtggtcttttttagggagccaacattcaacaagtccttcctaagaggtcgtctcaggggtcctcatccagttcctaacctggctcccctgtcccttaaatacctgtctcatctctcaggactggcaggggttccagcagctggagccaagttccaatttcagtggcaccagcagtacaatgacccttgtctttggactagttccacttaaaagaacctagccttcctagctcactttatcacgagctcaaaaatatacatccaaggacgtccattttcacatccttacgtgaaatccagatgtgcatcactcacttctcgcccatattaacacaaaaattcagcttctctttgtaggttccaaaagtaattatattctcactgaaagtattagtaagcaaggtagtgtttgcaatatgcaaggtagcatatctcagaggggagaaggaagactaagtttacattcattcagtgtgcatcattttttttgtttgtttgttttgttttttgttgtttgtttgtttgtttgttttttgagacagggtcttgctctgtcacccaagctggagtgcagtggcatgatcatggcttcactgcagccttgaactcctgggctcaagcaatcctctggccttagcctcccaaggagctaggactacaggcatgggccatcgtgactgggctgattttttaaaaattatttttagtagagatgagatcttgttatgttgcccaggttggtctcaaactcctgagctcaaatagtcttcccatttcagcctcccaaagtgctgagattacaggcatgagccaccgtgcccagcccggtgtgcatcatttaactcaaaagatcccccttggccatgttgccctcaaagtgcttcctctaagcttcccctcttaatctgactttgaccccccagagaatccagcctctagcctccttcttctccctcataaatttattatgcacagttgattctgactctagtttgaggctatccagcaacatcttttttaacaaaaatagcctcttcccacaaagaaattccttcaccaaatattacatttgtagtagccaagacaattgaaaacaaccttaatgtctacctatagggaaatgtttaaattataggaattaaattcaatattatgaaatcactgtgtcatggtaacaagggatcaagtcaatttatatgtacatccatggaaggaattccaaggcatactgttaagtgtataaaacaagttgcttaaaaagatgcataatataattccatttatgttaataagttatacacacacacacacactcatggaatgaggatgtgtggattccatgtgaatggaatggggaagctaactagcataaggcactattgtaagacctgagaaaattaggaacagctctcttccaaggaatacacctgtgattctcaaactggcagtgttgcaagttgaaccgtgtccccaaaaaagacatattaagtctctaatccctaaaacctcagaacatgattttatgtggaaatagatcattccagatataattacttaggtgaagacaaggttgcactggattcaggtgagcaacatgactagcatcattttaagaagaaggccacataaaggcagagacacacagggacaacaccttgtgatgacagaggcagagatgcaagtgatgcagttgcaggccaaaggacaccaaggcttgaaaacccctatcaggaagcaagaagaggcaaggaagccctctcccctacaggctgcagtagaagtgtggccctgtcaacaacttgatttcagtattctagcccccaggactgtggatcaataaatttctattgtttcaagccactgcgtttgtggtactttctttggcagcctttggaacctaatagaggaagtactttctttggcagccctaggaacctaatccctgtattagggatccctaatacagggatatgtaccccttgccctgcttctcttggtggcccaagattatgatgttatcataatgttatgattataatattaccataatcttgggccacaaagagaagcaaggcaagggatacacattccttgacccagaattttacttccaggaatcctgacatacaaatgtgatctaattaaaacagaatcaagtcatacctccatcaaaacccataattatcccattcattctgagtaaaggccaaagtccttacagagacctaaaaatcttacatgatctcggtcctcattggctctgagacggcatctccttctcttctcccctcattgctcaagcactccaagaggcctcgcttggcctcctatctattccagagcatgcaaaatatgtttctacttctctataccacatggccagctgccttacttccttcagattcattcaaaaagttgccttttcctaggctaaggacatgaatagacaattctcaaaagaagatatacaaatggccaacaaacatgtgaataaaatgctcaacatcagccaggcatggtggctcatgcctgtaatcccagcacttcgggaggctgagttgggtagatcacctgaggtcaggagttcaagaccagcctggccaacacggtgaaaccccatctctaccaaaaatacaagaattagccaggcatggtggcagcatctgtaatcccagctactcagtgggctgaggcaggagaatcacttgaacctggggggtggaggttgcagtgagccgagatcacaccactgcactccagcctgggcaagagaatgagactctgtctcaaaaaaaagaaaaagaaaaagaaaaaatcctcaacatatctaatgatcagggaaatgcaaatcaaaatcacaatgtgataccaccttactcctgaagaaataatcaaaaaaatcaaaaaataatagacattggcatggatgcggtgaagagggaacacttctacactgctggtgggaatgtaggctagtgcaatcactatggaaaacagtgcggagattccttaaagaactaaaagtagaactaccatttgatccagcaattccactactaggtgtctacccagaggaaaataagtcgttatacagaaatgatatctgcacatgcatgtttatagcaacacaactcacaattgcaggaatgtggaaccaacccaaatgcccatcagtcaacgagtggataaagaaactgtgatatatatatacacacacacacacacacacacacacacacacaatggaatactactcatccttcaaaaggaatgaattaatggcattcacagcaacttggatgagattggagactattattctaagggaagtaactcaggaatggaaaaccaaacatcgtatgttctctcctaagtgggaggtaacctatgaggatacaaaggcattagaatgacacaacagactttgggggctcaggggaatagggtgggaagggggtgaaggataaaatactacaaactgggttcagtgtatactgctcaggtgatgggtgcaccaaaatctcacaaatcaccactaaagaactgactcatgaaaccaaacaccacctgttccccaataacctatggaaattaaaaaaaaaatttttaggttgccttttcaatgaagcattccttagccaccctaaataaaatttcaaacccaccctgaaatgttctttttgttttgtttttttgagacagggtctctctctgtcacccaggctggagtgccaaggcatgacacagttcactctaacctctacctcccgagctcaagcaatcctcccacctcagcctccagagagatgggaccacaggcatgtgccaccatgcctggctaatttttgtattttttgtagagacggggttttgccatgttgcccagattgttctcaaactcgtaaactcaagatatctacccgccttggcctcccaaagagccgggattacaaggatgagccaccatgccaggcctgccctgaaattttatgtctgccttccctgcttgttttttctccttagtacttattattatctatattgttggtcatttatcttgtttattatctgtccttgtcccagttactatggtgacataacaaatcatcccaaaactcagtggcttaaaacataaaatgacattcgcttcgcttgcaaatctgtagtctgagcaggctcagcagggatagttaatttctgctccactcagcaagattgggtggctcaaaggtcaggaactagaatcacctaaaagcgtgattgtgcctgccctgggaagacatgaacagctggactctgaaacaggtagggcactttaggtgcctggctccttgggcacctggagctaagcagggagggcacagcaggagtctctctcatctttgtgtgatctctccacatggtcacttggaatggcagctttagggttgccagactgcttggaggacttgagatctccaaaggcaagtgtcccaagagaaagagccaggcagaagctatattgcctttcaggactgaccatacacttttggtcgaagcacttctgaagatgcacctcatttcaaggaaaaggaatacagaccccacctgttgatggaggactgtcattgtcacattgtaagaagagcatgtgggatggatgggctaaaaattgctgcagccatctttagaaagtaccatctgccacattccccctgctagaatgttggtttcatgaggacaggagttttttctgtttagttcagtgtgcccccagcacctagaggagcacctggcacatacgtgtgggccagagaagatcatgaggtatctagatgcaagtgataaactgttgtaccagacccagaatcaggagcttctgagggtcacataaacacaggaagaaggcaggtttgcaggagccaaggccctgcagattgtcaagaggacaggagtgggagggctgattaggaggtgaggaaatgagtacagagacagaaacatggtcaggtgacaaattgatagccaaagtcaagttaaaattagtttttgcctttagtctgaacatgtaagagttcttcttaggcccaaagatattgtaaggtttcagcccgtgttcaggataaagcagcctttctctgattctgctaattttgggcttattcacccctccatagcattaggggagcagaagatatgaaaactaatagccagtatctatgagttaatattaaacgaaaactttggtcttttccagggctgtgctgacaaatgtttaacaactaactctccagaaaaagaagaaacaaagccttaattcgctgatttgtagcatttgcctgtatctatgatgtaaagactcttactgtggccaacttcgagtcaccaacaggacatcacggcatgtggattgggaagagatggacacccccggctctctcaagcctgtgtactggctccagcacatcatcatgactttcactttccacattcctgacagaattcgttattcttaaggagacagttcactctctcctcctccaggacttgaaatcaaactctgataacatgagtcaaattggcgttttctgttttttgttgttttttttttctgtcagcaagcgtggccaagctgactagcagtgacaagatatctacattctataatacaattgccagggaaggagaggcagcaagggctcctgaagacatgggatgctcacactcttccattctaagggcatcagcatcctgcatgaagtcaacagccttgaccaaggtgtcagtgagacctgcagtcatgactttcaagtttgttagcactgcattcccctgggagtaacagaaaatccaactgtctgacagtggctggctgaatcaggcagagacttattttcctctcctaacaaaaagtctgggtggagctgactagggccttcggggacctgggctccttctgtctttccactcagctctccatcctcctccttgttgctggatgttcacaagacagtggccccaccctcagcatcactcagtgtttctggcaagagaaggaggaaggtgaagggtacaggatgcacaccagctgactctgacccctgataatgagcacactgggaggccccatccaaagacttcagcttacatctcacggcccacagccatggcatgtggccactgttcccttcaggggaggctgagaaatggagctttcaactgggcacattgccacgccaaacaaaactgtggttctattcagcaaccaatagtgtttgtcataagtataaatcaccagagaagcagggagatacagtcagagcagaaggacacaggtctgaagacatcagcctcctaagcatgctgacagcatccactcacactgaccatttgcaaggtactacttggacaccacagttctacctatgctggaggaaatcctaggcctcccacatctgcaaatttccctttgacaaattgtgattccctctcttcagtaaagaatgtcatgaaaaggcctagatatcagtaggagggagccctgaggaggtaacctcagaggaggagcacacattggcacaggggacagacatccaagttgctcttccagacatctccttctcaaggatagttaagtcccccctcaccaacaagtccctctcaagagctgctgtgctactattctccacactgacaggacctttctccttggctggaccactctgggccagcatgtgaaacccaccccagagcacagtccacggcaaacttcaaaggatgactggatcaaagactctctagaggagggttctccaaagcttttgatcgcatacttcattattaaaacatgattacacttggggaattcaaaagatccccaagatggaaaaaaatgattaagcatatgtgcttctaatagatatatagttactatttatttaatatatgcatataatatttgctagcataaaacataggcagaaattgaaatcttaaaaggacaagctaaaaataaatagagagatgcggctggcagacgcgtagtgtgggcacacacaactgtcccatgtgaggctcatggtagatgaggccctagtagatgggccatgggcccaggtagatgaggcctggagcctggctggccgggccatgctgctggaggtgcagggcacacccgttcgtggtgttagggctggcatgccaagtgcactgcggttgtccaccaactccttcctggtttccctgatgtggccgtggggctgttcgccttcccctttgccatcatcatcagcctgggttctgcactgacttccacagccacctctttcttgcctgcttcatgcttgtgctcacacagagctccatcttcagcctcctgtccatggccatcaacaggtacctggccagccacagtcggctcaggcataaaagtttagtcactgggacccaaacaagaggggttactgctgtcctctgggtccttgcctttggcactggactgaccccattcctggagtggaacagtaaagacagtacctctaataactgcatggagccctgggatggaaccatgaatgaaagctgctgccttgtgaagtgtctctttcagaatgcggtacccatgagttacatggtatatttcagttttggggggtaagtcctgcccccactgctcgtaatgtggctgatctccatcaagttcttcacagtgactgcaggcagctttagtacacggagctgatggaccactcaaggaccaccctccagtgggagatatacacagccaagtcgctggctgtgatggtggggatgtttgctc

SEQ ID NO: 4 - DNA, 40104 bp, Homo sapiens
  allele (1)..(40104): HSD11B1 Variant Allele (rs17015076)
acaattcagaggctgctgcctgcttaggaggttgtagaaagctctgtaggttctctctgtgtgtcctacaggagtcttcaggccagctccctgtcggatggcttttatgaaaaaatatctcctccccattctggggctcttcatggcctactactactattctgcaaacgaggaattcagaccaggtaagtacccatgcgtctcattttggaggaataggtttaaaaaacacaggggtgcttgagtgttcctgaggaccaagatgtgttcttgatcctcaaagttggtgaaaatgagggaaccctgagttaagatggtatttttgtgtcctccagctacaggctgtggacaggggggactgtgtaggaagggtaatcgtgtagccaaaatctagccaaataggccatgctttatttggcacccttaatggaaagcagtttcaaatcttctacaaaaatgagagtaatacccaaattcacaactcagcagctaattgggctctatgaagagactgataagtgggaggcaaaaaaaaaaaaaaaaaaaactggagatgatgactacatagaagtgagggaaaatccctggaatttctatgaacacatgtgttttgattccttgttaaatgtactttcaattgagcaaaattgaaagagtccagaaatgtctggaactccagcattttagctgaaccatgacttttctggcttcatcctatgatctctttccatggaggtttttagaaatgacagtagggaggctgtcagcccaaacctcccacttcagagcatgtttatgaaagacctggcctgttcccacagtgatttacggagtttgtgacaaactgatctgggctcataacctttaagttacaaattgcgataagcatgcctatatccagagagggagaaggaattttgctgccaacttgggtatggtcctcacttccttttggggttccccagagatgctccaaggaaagaaagtgattgtcacaggggccagcaaagggatcggaagagagatggcttatcatctggcgaagatgggagcccatgtggtggtgacagcgaggtcaaaagaaactctacagaaggtgagggttctatgctcgcagatatgtgtaccgtcacatgctcagatgtgttcttatatatgctcacatatacacagaagctagcatatcgcagatctatatacagaggcacatgcacacacacagacacttaattttgcactctcatatatagattcaaacaccaaaaaacccacaggaatataaaagtatgcatttaagcattcattcatgtgtgtgtgtgtaatatattctgcaacagagtccttgagttatatatgctcacagacatgcctagtcacacacatttacacatggaactacagatacatacggatgttttcaaaaactgaaatcccagtacctgcttatgaatacatatcctcatacccatgcagactcccagacacatgccctctcatggactcacaaacccaaggatgtacaaacattcacaaacctagagctacccacatagtaaccagcatctacactcataatgccctcagaaatgcctattcacagaagccatgagcataaatcatgaacttaaaccccagcactgggatgatttatccatttgaaccccaccaagttccagaaaatatttcagacagaggacgatgatcatgagggttatattaggcaacacacacacaaacatacttaccatttcttacctaaacagggctgtgagcaatctctcatttaagccccccgttacttcagagactaccccccaaaaatctgcagctaagactgatgccatttctgctgtatcactgcaggtggtatcccactgcctggagcttggagcagcctcagcacactacattgctggcaccatggaagacatgaccttcgcagagcaatttgttgcccaagcaggaaagctcatgggtgaggctgtttctcttacctcctcctctgaactttgcccttggggtcaccaagagcttttgggaggagaatgggaaaggtatcaaccccagatgatttcttaatatagccatctcttgcaggaggactagacatgctcattctcaaccacatcaccaacacttctttgaatctttttcatgatgatattcaccatgtgcgcaaaagcatggaagtcaacttcctcagttacgtggtcctgactgtagctgccttgcccatgctgaagcagagcaatggaagcattgttgtcgtctcctctctggctggtaagtgggacagggacatatgtggaaggtagaagaaaaaaaaaaatgccagggatgatgccaggctctgaagtagacataaatttttatcagtttccatgcagagaagtaatgagggattggtcaaggtaagtgggctacaaaattcttttaagtaacagagaaaaagcagtagctctgagtgctcattggaagactgaattgttttctacaaagtaaggtcaaagggacttgaggggctgctggaggtacagcctgtcctggtcctaagggagagacctagttacaatattaacttgaagttgaaatgttcatagtaatattaaacaaaagctgattaacagcttactcatatgcatgaatgggcagatgtactgataagagacttgtaggggggtgatttgtggactcaatgagaggcacgcatcctgagtaaaggagacactgttacaaactagtgacaccataaaaaatgaaggattggtcaaggtagatgggctacaaaattcttttaagtagcagagaaaaagcagtagttcagagtgcctattggaagcctgaattgttttctacaaaggaaggttgaagggacttgagaggctgctggaggtacagcttgtcctggtcctaagtgagagacctagtcacaatggataaaaaggactttgcttcctccatgaccaaaaggttggtgaagttatgtaaatgtgaaggtacaactgagaagttaactgttttaacaacacacaggtgtctgataagtgggctaagctaaagctaaataaaatgaacaacaagaaaaaaaaaaaagatgaacagacctgcctatagtgggtgtattctctaaaatttgaacatgttaacatgaaaagatcaatttaaacaaccagctgggtagggaggaaatgtgtccagagaaatggtcatgaaaagatatctgtgggatcaagagaggtccctggtgttctggatggtggtagcatcagaagccatcaccagtaaaaaaccagtgagttcccagcttgggacatttctaggcccatttttatcatagatccaggagacaagttccacacatctttgttgattagtcagttagaaggatgtggctggaaagtgcaaacaccaggatcaaaatccgccatctaaatgttgttcctggcaaaataaaaacaaataacctagaggactctgtaaactgttaagcacttcacaaacattcttattgaaactaatagcaccatctgtatcgtaaagagttctcctttctggcccagggacggcctgcatagtgattggataaaggggcagtgtgtctgtgctacccgccaaacagtgtgattgatatgcatcccggtgcttcccagacaacacacactccccacccctccccagacacagactctctctgggctggaagaaagggagagcttccagatgcatactgagtgggagggtgctgggcacatccccaatccatcccagggcattggacaaaatcctcacatcagtcatgatgtaggtggctttaatgatttcagctgattaaataatacattcactctaggcaaaggatgtatttcacctttgacgaatgtaactttctagaatgtacccatgatctaaatgtgctcagaaggactaagaattactgttgagcccaaggacgtgatgaaattctgataatctctgtttccccatatctcctacacttattgaatgacacttggtaatttccatgaactctgggaggtaggaaatctagctggatgagtatctttggtgtttattgcttgtgtagccaaaagattccagcttttttgccttgaaacctgtctatgaacttgcaaagtacagacacattgctgtcttgccgcaactgaagaatattctctgctttatgatgtattcttttaatcagtcagtaaacatgttcattaatccttcctctttaaaatctaaactctataaatatgggatgctaaacatcaagttgatcttaaggtcagccaaacagtactgggatggagttttaatcatttcttctagggaataccttaagttgtttattgagtttcagtgataaagaattgttttttctccacaatgcatttctgggtattgcattacatgggaatactatacttctaatatgttccttaaaggcttggttacctctgtagcattaacagagacaatactgctgcttctgggaacctccttgtagtccacatctatccactattcaccaccttttcttggcacctattgagcaagtttcttgtatgtgtaacatcccgttacattgattagcctcctctccttccaccacttgctagttaggatgtaagttcagctactgtaacgaagacccgaatttacaatggcttaagcaaatctaaatttatttatctcacacaaaacaccctggaaaggcagtccagggctgatatggtagttctgtcctatgaggctgtccaggaggccttctatctcagaaccaccattcctagagtgcttgtttacacctgcatgtccaagatggctcattggcatgtctgaattctaactcaagaaaatgaaaaaagaaggataccacctggaaggtgtacacttttcttctgccacagctggctgcaattgttatctttattcaaagggaacatgtgtccaactaaaaatcagaagttctatttgtgtaaaagacactgatattgataaacaactagcaatctctcccacatcacccatgctaaaaaacacataagactagaaaaaagtataccctccaggccatcccacatgtgaaacacacacacacacacacacacacacacacacacacaaaagactcattccctctcacattcaaggtccatcacaaaaaacaaagtccttccatccggcagtgcgtgcaggggacagtggggtaggagaaagaatggaaagagaatacctaaatagcatttgtgaaacaaaccaaagtagaaatattaatacttgaatatgactaaaaaaaatcactggagtgggcagagaacatttgaaaacatctggaaaaaagtttatctgacattagtcaaaataggtcatcttaggttcaatattagaaaagtaaagttggtttcattttcgggctcctgggcttggtgaatcccatcactgtggtgtgtgtcatcagttgcacacatggcagctagaactgagcatctaaggccatttctccacctgctttatgcccctgagaggaatcacggacaaaccctgtcttcctctgctcctttctcctctcaaaatctacttagccccctacctcctatgaagtctttttcagaactcaccagagccatttcaatgtttcttctttgtctttatctactatattttggtaagttaactttagaaatccaacttcctcatcatttctcttttttgggtttattggtaatccaaatactactaatactactcataactactaataacacaaatgttaaacatactcggcaagcatacgtgtagggatagtaatccttctggatcaaggaaaatgcaaggtatattttgaagtgaaactggacatcacaaaagactcagttgctttaaatattcaaaatgaaaatagatcagaaggaataaaagaaccttgtcaataacctttgaatcagacttctcttgagaagctccataagtgtctccagttaactattcacttttctccaagtaaatcttcttaaaaaatcaactttccctatatatagatagtcttattcaaatgtattcctttcctgttttactcattcgcagcattgtttcatactgttttttaatgtacgtgtgcagtctttcaggcactttgagttgagttgactagccgggggcaaacattcataagacagtgctctgtgggaaaactcaaaccaacagatgaagtcacttgctggatcttaacctatttgtcagtggaggtctgcctgtgtggtctaaatctatttcaaaaattcaacattatgaagtggggggagaaaaacaggtttttcaactacacatatcaactaacaggacttggaagacctataatgatgttttgcatagacaaggatatacagatgttaatgtcatccctgccttcagttctggcatacccactccttcctgaaaggtgggccaatgtttcaatgtatagctgtgcctcaggttattgggggtggggggatcccaaactccagattatgaacgggcctcagaaccagagtggaaaggggcaatttatcccttgccacagttgttctcatttttctaagaaaaaatgccgctttacccttaaatccaattacctcagaaataatcttcaggaaccaggatttctgaggtgagtggaagtgtttatccatgtgaacgtaagcatttacatgagggatggggagtggcgatggctgcacagggttgagctgtgtgttggggggatgggtagaagtacgcagaggtgaggtatgtgtttgtgtagacgtgtcatccatagggcctataagaatgccaagaaggagatcagagtaaaatcagcaacctgggcataaaaattccagaaaatttattctataaaatataatcattgttgtctaaatttaagagatcgtgtttgggcaacactgtgaggattgagacagaatctgctagatttatctaggaattcagttctgcatcagccccaaaaagaaaggagtgggggagatttgaaagggaggaagactctttgatgaagacagtgacaatttagtgcaggttgagaataatataatgctacccgtaatcattgttgcttcatgttcttttctggaaaggctcggctgaacttaggtagttgaggttacttatccctgctagaccacaggtttcattcaagtgcacttgtggatggaaatagcaaggttctaccatcatttgtatctttacgtttccttaccaaggagtttgagaaggcttacaacaaatacattctatttggaaaaacacaaatagaaaactaggtcttaagaaaaggagaatataaatgtgcccaaattagactcagtatagatcctgtgcttaagcttcaatattggcacttgaatttcttaacaataagaaaaagaaaagaaaaaggacaagatcagtgtacagccagcactctgcatgcctgggttctacatctgtggattcaaccaaatgtggatcaaaaaaaaatggggggaaataaattaacagagttctaataagcaaaacttgaatttgctacatgctgggtactatgttgaattcacagaaatgatataaggcataggcaccaaattaggtattataagtaatctaaagatgatttaaagtacacaggaggatgtgcataggtaatatgcaaatactacatcattttatatatgagggacttgagtatctatggatttgggtatccacagaagatcctggaaccaatccccctttgaatactgagagatgactgtactcagagtaggaaaaatgcatgattcttatattcatttaattgtttatttttgtgtattttttaaagtctaggtctttatttgtcattttgtctaaggtaatttggaaatatgtaccagaagccttaagaatgtttcctttggccaggcgcagtggtttacgcctgtaatcccagcactttgggaggccaaggcagacggatcacgaggtcaggcatttgagaccagcctggccaagatggcaaaagcccgtctctaccaaaaatacaaaaattagccgggcgaggtggtgggtgcctgtagtcccagctacttgggaggctgaggcaggagaatcgcttgaacctgggaggtggaggttgcagtgagccgagatcgcaccactgcactccagactggggcaatatagtgaaactccatctcaaaaaaaaagaatgtttcctttatttcacccagtctaagtgcaagaatatatcaaggaaatagctattaaattagtcacagatttaggtacaaaaacatttgttgtaggattttttaaattgcaaaacattggaagtaacctaaatgtctggcagtaggaaaataactagttgtactatatatttatatttatatctgtatctgtatccatagctgtatctatatctctggaaggacattttccaaaatattagcatgattatatctaaattacagaacaatgaatgatttttgtttttagcttcatatttttcttcattttccaaattttcattgtgtgtgtatgcatgcatgtgtaacttttataatcatagaaacatttcaataagttgttgggtgtgttgttttttccattgctttgtgcctcttttcataaccttttatgagaaattcatttcagaaattatttgcttcttgctgtgcttccttcttttaaatataatcatatacacacaccctcaatttcttcaatggattggttccaggacctcccacagataccaaaatccatggatgctcaagtcccttgtatgaaatggcatagtatctgcatataacttaggcacatcctcctggatactttaaatcctctctagatgacttataatacctaatacaatgtaaatgctatgtaaatagctgttatattgtattatttaaggaataatgacaagattttaaaagtgtgtatgtgttcaatacagacacaaaattatttcctgaatatttttaacccatggttgcttaaatccaaagacgcaaaatccatggatacagagggctgcctatattgatttccataagtagaaatttgcttaagtacttcaagaggaatggtcagggagagagagcataacttcatgtctgagaagtttattctataaacaaacttgaacaagtgcttcccaaatatactcattcattcattcattcaaaaaatatgcatgaaggtcaactctgagtcaggcactatgccagatgccaaggctatggcagggagcaagaaggccaaggcaagatacctgttgtgcacccacattctagtgtaagccaagttgttactgtattgtttatagttgtaaaaacaaacaaacaaacaaaaactagaaacaacctaagtagcaacaaacataaaacaaacactctaagggataaaaatcatgttacagatctattggaagggtttttatttcttggtatacaaaatagtagtatgttttacaactgcttgcctctgaaagctgttgaaatacagcattttactcacagtgattaggctgtgctctccttaaaggcaggcacattgttcattcatctctgattccctggagctaacaaattttgcaaataatcaacacattcttcttgaatgaacaaatgataaaatagcttgctagtacctggatttctggcttcatgtctttccttaaactgtgttggagactcacagtcatattttccctccatatttcctttctgtttctaggccttcgtgtcagggcttcttaataaggatactattggcctttggtgagggacaattcttcattgtgtgggactgtctgatgcattgtcgagcattttttagcatccttggctctgaataattcaatctaaaagccactcatagaggccaagcaagataggcatcttcaccggggaggaaggtggcagcacagattgaaaaacttgagcaggatgggacaggtttgtgtcacagagcaggtttgggacatcagagactgagtgagatgaggatggcatcctcacatggggcagcagtggtggcctagtgtgaagtttcagagcctaagtgggccaaggaggctcttcatgtggcacctggcacagggcatcagaactaaggggagtgatgagagcatctgcaagagggcctgccatgggcagcccgacatagggtaaagaaggcattcaccaggcattcatgtagcctggcactggggtgtcagaacctaggtgggatgaagaggccaaatgaagaatgatcacatacaggagcattaatcacataagtaatacatattgcagatcttggaagccccaggttctcactatcaatgttacaaatatgaaaaggaagaaaatgagaatgaatcctctagtgttggattgcaattggaagtgtgggtatgaattaatagttgtttaatacacaaggacagatatataaatatagatgtgtgtctacatatacatgcatgtattcactcactctgtccactgacaggacctgggagcacacttggtgcccagatcttgttttctaaatatcattctccactaaaaaaaaaaacaacaacaacaaaccaccaaggcttcttagagaaatgactgattccagggcagtggcaagaaaggtacaagataagcctgaaaatcttgttctgccagtaagtacagaactgctcaaaggataataggcacacattaccaggacacagaggccaactttaaagggatcccactagccaaacctagaaccattgaggcatcaaaacaaatagtagtaacagattatcacccattgcaacaataggaaataagtccatgaagtcataaataaatgcatgaataaataaatcaagagaggggaaggatttttcatgaagtggaaagccaactgatatgaaatgatgaacttagaaaatcaccatttggtaaccataattgtaataattcagccaggaagcaacaaaggatgctaaaagtagtgggtaaaagttaaacaaggaagacggtatttacatagtctcaaagtactaccctgtgcaacaacaaccaaaaacaccacaaatgacctgattcaaaaatgggcaaaggatatatgacagacccacagctaacatcatactgaatggggaaaaactggaaacctttcctctaataattggaactaaacaaggatgcccactttcaccactcttattcaacacagtacgagaagtcctagccagggcaatcaggcaagagaaagaaataaaagacatccaaactagaaaacaggaagtcaaattttcactcattcacatgacatgattttataatcagaaaagcctaaacgctccacaaaaaaactcttataactgataaacaagttcagtaaagttgcagtatacaaaatcaacatacaaaaatcaacagtgtccccatatgctaacagcgatcaatctgaaaaaaagaaaaaccatttacaatagctacagaaaaaaaaaaaccacctaggaataaatttaaccgaggaggtgaaagacctctacaggaaaaactataaaacacccattaaagaaatggaaaaggacacaaacaaatggaaatatatcccatgctcatggattagaataattaatgttgttaacatgaccataataccaagagcaatctatagattcagtgcaattcctatcaaaataccaatgacatttttcatagaaatagaaaaaaaaaacctaaaatttgtagggacgaaatagccaaagcaatcctaagcaaaaagaacaaaactgcaagtaatacattacctgacttgaaaatatattaaaggctatagtaaccaaaacagcatggtattggtaggaaaatagacaaaacaatggacaagaatagagaacccagaaataaaccgatgtattcacagccaagtgattttcaacaaaggcaccaagaacatgcattggggaaaggacagtctcttcaataaatggtgctggaaaaactgaatattcatatgcagaagaatgaaactagatctctatctctcaccatatacaaaaattgatgcccaacagattaaagacttaaatgtaagacctgaaactatgaaaccagaagaaaatgtagggagaacattccatgacattggtctaggcaaatattttatgactaagaccccaaaagcacaggcaaaaacaaaaatagacaaagaggactatattaaactaaaaaccttcagcatagaaaaggaaacaatcaacagagtgaaaagaccacctgtttaacgggagaaaatatttgcaaaatattcatgcgacaaggactaatatccagaatatacaaggtactcaaataactcaataggaaaaaaaactatctgattttaaaaatgggcaaaagacctgaacagacatctctcaaaaaaagacatagaacatataaatggttaacaagtatatgaaaaatgctcagcatcactaatcattaagaaaatgcaaattaaaactactatgagatatcatcttatcaaattgctattatcagaaagacaaaacatagcagatactattgtggatgcagagaaaagggaactcttatatactgttagtgggaatgtaaattattacagtcactatagaaaatagtttggagatttctcaaaaaactaaaaatagaactatcatatgatccagcaatcctgttattgggtatttatcaaagagaaagaaaattggccaggtgaaatggatcatgcctctaatcccagcactttgggaggccaaggtggacagatcacttgaggtcaggagttaaagaccagcctggccaacatggtgaaaccccacctctactaaaaatacaaaaattagccaggcttggtggcctatgcctgtaatcccagctacttgggattatagctacttgggaggctgagacaggagaatcacttgaacccaggaggcagaggttgcagtgagccaagatagcaccactgcactccagcctgggagacagggttagactccatctcaaaaaaaaaaaaaaaaaaaaaaggaaatcaatatatcaaagagatatatgcaactccagtcatttgcagtaatgtggatggaactgaaagtcattatgctaaatgaaataagtcagacacagaaaaacaaacactgcatgtactcactcatatgagggaactaaaaaggtttatctcatgaaggtagagagtagaatgatagtttacagagactgggaagaatgtcagcgtgttggcaggagggtgaagaggggttggctactgattacaaatatgcagttagaaggaataatttctaatgttcgatagtagagtgactatagttagtaactatgtattgtacatttcaaaataagtgaggacttgaaatgttctcaacacagaaataataaatgcttgtgatgatggatatcctaaatacccttacttgatcattacatattctatggatgtaacagaatatcacatactacccataactatatacaaatattacgtatcaacttaaatttttaaaaaaatttaatgggcaaaggacttgaataaacattttaccaaagaagacaaacaagtggccagtgagcacatgaagagatgctaaacatcattaatcattagggaaatgcaaattgaaactacaatgagataccacctcacagcactaggatggctactatcccccacacccccaaaaaacagaaatagcaagtattggtgagaatgtggggaaattggaatgctgtgtactgttgatgggaatgtaaaatggtacagtcactatgaaaaacagtatggcagtacctcagaaaatttaaaatagaattatcatgtgatccagccattctatttctgggtatatacacagaagaattgaaagcaggaggccgggtgtggtggctcatgcctgtaatcccaaggtgggcagattacctgaggtcaggagtttgagaccagcctggccaatatggtgaaaccctgtctctactaaaaatacaaaaattagctgggcatggtggcaggtgcctgtaatcccagcttctcaggaggctgagacaggagaatcacttgaacccgggaggcggaggttgcagtgagccaagatcatgccactgcactccaggctgggtgacacagtgagactccatctcaaaaaaaaaaaaaaaaaggaaagaaaagaaaagaaagcagggtctcaaagagctacttgtatatccatgttcacaggaacagtatttgtaatagcaaaaacactgtatgtttcactgttagcaacccaagtgtctatcagtagatgaatggataagcaaaatgtagtacgtatatacaatggaatattattcaatctttaaaaggaaagaaattctgacacatgctacaacatggctggaccttgaggacatcatgcaaagggaaataagccagccacagaaagagaatgaaccctctggtattggtttgcaattggaggaaactgtatgattccacttacgtgaagttcttagagtggtgaaagttatacaaagttgaaagtagaagggtggttgccaggggctgggaaaggagagaatgtggagttattgtttaatgggtgtagttagttttgctacatgaaaagagttctggagatggatggtggtgatggttgcacagtaatatgaatgtactgaatgcccccgaactgtccgcttaaaaatggttaagataggccccggcgtgtgatgttcctctcccagtgtccatgtactctcattgttcaactcccacttatgagtgagaacgcgcaatgtttgagtccttgtgatggtttgctgagaatgatggtttccagcttcatccaagtccctgcaaaggacatgaactcatccttttttatggcttcatagtattccatggtgtatatgtgccacatttgcttaatccactctatcattgatggacatttgaattggttccaagtctttcctattgtgaatagtgccacaataaacatatgtgtgcatgtgtctttatagcatgatttataatcctttgggtatatacccagtaatgggattgctgggtcaaatggtatttctagttctagattggctgggggaaggacagcatcaggagaaatacctaatgtaaatgatgagttaatggatgcagcaaaccaacatggcacatgtgtacctatgtaacaaacctgcatgtcatgcacacgtaccccagaacttaaagtataatttaaaaaatggttaagatagttttttttaagtaccacccgaaaaacaaacttactgattatgacagggaaaagagtaattttacagaagagaaacctgatagacggcacctgattcaaatgatcatggtttattaacatcaccagtaatggaataaattgaaaacatgtatcatttgatggggtgcaacgtgaagaacaaaagttacttttgtgaacctgccaaaatgcataacctgaatcaaatcatgaggaaacaccggataaatccaaactgagggacatccatcaatagcgcgctggtaaatgtttaacaacaagctatccagaaaggaagaatcaaaagccctgatttgtagcctttccatgtaatcaacactcccatgatgaccatatccacatgacattctcttgcttgcaaaatttataaacatttaaccaccagctctcacaatctagtatgagccagcttcggcatatcagcttgtacaaaataactggctgtactctccaacagtgccaaggtcatgaaaataaaggaaagactgcagaatcattgcagagcaaaggcaactgaagagtcatgacaactaaatgccaactcatgatcctcaattggatccttttgctataaaggatattattggcacacatgacaaaatttgaatagggtctgtggattagataacatggatatgtcagtattactgtactgggttgaatagtggccccaaaaaagatatatctacatcctacctgcctgaacctgtgaatgcaaccttatttggacaaagggtccttgcagatgtagttaagttaaggatcttgtgatgagatcatcctggattagccaagtgggctcttaatccactgccaaatgtccttatagagtcaggggaagagaagacacagacagagagaagaaaaagccatgtaaagatggaaagtagagattgtgatgtagccacaaggaatgccggcagccactagaagctggaagaggcaaggaagcactctccctcagagtctttggggggaatgcggccctgccaacacattgatttcagacttcttgactccagcactgtgagagaataaatttctgttgtcttaagccacccagtttgtggtaatttgttatgacagccctaggaaactaataaattccctcattttgatgactgtattgtgattatgtaggacagtgtccctctgtgtaagaaatgaacactaagtatttgggggagatgggacatgaggtcagcaatgacctcaattacagctattaccctcaaatggctcagcagaaaaaaaaaataggttgtgtgtactattcttgcaacttttctttaagtttgaaattatttcaaaagcaaaaaaaaaaaaaaaaaatccccatcctgggagtctagtgacttggaggacatatgaaagtgaattctgtggggctttttctgggttcttcagagatcccctgcaggagacaccactgctgccgcccattccccctgcagttccctttgtgtgagcaatgccttctctagctcattattttcagttcagctttcttctcagttcctaggcttcaatcagcccagcccacttggcccagtctacccaaccatccctgggcaggtgactcctgggcagcccccatccacaggatccacactgggcctctgggaagccaatccttggactacatggttgatcccacaatgcactcagctttgttctcaagcaagggcacttccagccctccctgttgcctttagactttagatgtgagtcaaattccagtccctgaactccaggggacatattaaaagttctccaaataatgctattgaggcccctctcatatggcttaagtggaaagggatgaaactgccctgagcgtcggtggatatagacacaggacattgagaactatctcttatccaagggtgatttaggctaggcacgggtgattaggcaatgcaggcagaaccggtttgggcccacccttcaactgtggatgttcttcaaatctattcttttattcttgccttagaagatgtgctgatactctgagactttaggaagaactccatttcatatcctgtcaacaggccccatacctgcatagaaatattcttgccaaagtcaccttgtgaaatttagtaaaagttttatcttatttatctctgttacatttttgtgctgtttcaacaccaaacgctctttcctagtgatcagccaaaactttgccctgggttttctctggccaccttaactctcccctctcagtctcttaggtttcttggcaattctccaaccttaattgttggtttcctgaggatttttctatcctgaaccctcttctcttttcactcaacacactttccctggataaatccattcattccatttcttcaagaatcactggattgtgggatgtctcaatacttatgatgacacctcaggtcttctggggtatggagaagataggtggatttatcttgagagcccaactcaatccaaacaactaaagagtttagaccatgagggtctcaactgaggaaggatttttaggaagagctgggaaaaatggggggcaggatcccagatgactctctggccttgaagccatttaggcctgatgcacctcaaatttgggctcattcatttgcctggggttgctctaaaagtgtgaaggcaggcaggaatgaagtttttcaatccttgtgcactcccctctgagcaatcaattaaagcagtctaaaatccatctttgaattggtaatcatttcaaaatctcagcaaggcagttagggatggagggtagagaggggatgaacgaaagcatgtaggcctccttttgacctcttctactcagctaataagcctcagtgcatggcttctttgccagttctctggctcttgctgtttctacagtggctgagtccccgcatttctgggacagagctaattacaaacattctgtcccacctatcatcatgtctgccttcatccttctaagactctgtgtcccatattttgcttcagaaaatatagtcaccatagctctgtttctttgtgttctaaaacttcccagaaagctagctgccatctttctcttctgctatcatggacccaccctcccacataagccaaaacttaaccttgggtagaaacactcaggcttccgaccccctcaattccacgactgcttcatgcatattagaacagtatatttatttacttactaattttgttgagcacatacactggcacattttttaaaaaaaactggcagtctaacaagtggatctcatagggtgcaatcagaaaacaagttgattctttcctccccctgcctgttcaaacctgttctgtgcgcaggtcctccctgagcctggacatgagctagggcagatggcaacacttttctggttactccaggttaataaaaaatcctatggctgcctctagtccacagaacagtctcatttccaaataggtaagatgtctagtcatgtgcaatttaacttttaccaaagcttctccccttgctaagctggaacctgctgttggtaggaaatgtgtttgttctttcctctctttccccacctcctccccactccctgaccccctctagcctgtcttgggttaaaggaaaagggacaatgcagggaagaggataaggagtaggaaaggtcttatttggctggcacccagctaatatattggtcttctcttgacattcagaactcatgctctctgaccatttggtggatgatcaaatctgactcttgcattgcatgcttttgtggattctttggaggccctttctggaatactagttattcttcttgtggtttgggcagcagttgcttatgttatttcctttgggccctgggaatacagtgggaatacaagagaatacactcaccacttcaggctgtccttttgggcagaattggaaatggctccagaagagaagggatgagtcctgggacaaggcccacagggtggtgagcagagtgtgggctggatttcaggtccacctacaagggagagtttccataggtgtgacacaatttgggctatgcaatggctttgcccatagccatggcctctcagattgagtcagaccccagtcctccttgttgctcatcaaactctttgggacgagctctctgaggtctctttgaagtcactctcacaaagactgacgtgaggaaaatcccccaccccttctttttggaagatcaatgagacattgctaatttcttctccctaactcctatcttctctggcctcccagtgtcagcccctttatttccttgggatgtttgtttgtgtttccatgttccctgtaagtgcacaggtggtctggaacctcccttcagaacgtggaagcctttgccaattactgtgatgttctcagcctttgaacctcagctgaaatgaaagcagaaaaagtcaaattttaacatcctgttacatgttgtttactccactttgaccaggccttttgactcatggaatcttttttaaaaaataaaaatctagatttttagagggattttgcccttttcagctttctgaaacttctaaatatggtttacatagagcagaacataggggtttcctcacacaagctaattagcattatgtggaaaaatgtttaagaacacacttgtgaatagaaataggctttaattaaatgcaccaatgttgtttgagaatggaagatttttctctcttctcttcattttttttctgctttttaatttttaatatatgttccagctttcctttagtgggcctagactggttcacaatccttatctgcaattccaaaatccaaaaagctatgggaaaaaaatggaaacaataataaaactccaaaaactaaggattttcttttcataattaaatctacctaatgaatttaacctgaactgaagtgaggctacttaaatcctttctttatctcagtatgaactttccaatattttagtgcagaaataatacatgctgtcttacaggctgcctcctccaaccctactggagatgcgatgtaatacctattaatgcccataccaccatcaaaaatccaaaaacaaattaaaattccataatacatctggctctaagagttttggataagtgtttttaagtctgtacttttgtaaaagaaaaaatacaataaactttgctattattttccttgtctgactagcttctcactgcctatctaactcctgcctctaatttttgtacaagccattcttccacctccctggtccttcatgtacttcctttcatcaagcagaatttacaacctacctcctccaggtggagtttcctgatagtccaatatcattctttacctaaacatccagtttggatttgaaatacatgttttccttagtcatgccagtttgggttttaaagagacttaattcataattcagtgactgctcacccagctgtcattgtgggactttagcctcttccaaagacctctccccatttctttcaggagttcctagatgatgttcaacaagcttaggccaccatgcctttcctaccccacactcattctcaaaacccactatgaatatcatttatggataaagccactctttcctactgaacagtttagcacagtcctctactccataaacagactagaagaatggggggcagagctcaaatctgcaggttaatggtccttatttgcacatggtccttacgtgcattgaatttgagtactggcttaaacatttacagatcaatagcaggtcacaaaatctgagagatgtcaacaacagctgtagccatatgttattatgttacagtgcacctcatgcatagtcttcacaataaaggctaatcgtttttcagtagtctttgtccaaccttatatgcttgcataatagttcatttttttcaccaattaaaagcaggcggatcacgaggtcaagagatcaagaccatcctggccaacacagtaaagccccatctctactaaaaacacaaaaattagccaggcatagtggcacatgcctgtagtcccagctactcaggaggctgaggcaggagaatcacttgaacccgggaggcgtaggttgcagtgagccaagatcgcgccactgcactccaacctggcaacagaatgagactccgtaaaaaaaaaaaaaaaaaaaaaaaaaaaaccaaaaatattttttaggcttggcacagtggctcatgcctataatcccagtattttgggaggccaaggcaggaggatcacttgatgccagggattttaggccagcctgtgcaacatagtaagacgttgtctctacaaaaaattaaaaataaattagccaagcacagtggcatgcatctgtaatcccagcaactcaggaggctggggtgggaggatgagctatgatctcaacactgtgctttagcacttcagcctgcgtgggtgacagagtgagaccctgtttctaacaacaacaaaaaaaaaacttttttaaaccatacaagcatccatgtcatgaatttttcaggtggtcttctgacatgtctggctccttcactacttctctcctttcttctgctttcactttctctcttctcttacctccttctcctacaaaaccatttaggattcttctatgtaccttgagcataacctgaggcataactaaggataggcaatgtgatgcatgagctccataagtggtataaaaataactgctctaggaattcagactatggcttcgcaggatatcttgcttctgtatctctgttgccacctagacaaacacattaaatgtcatagtcaatatctttattgtcatctaggggtgtgtagtgggctgaatggtggtcctcccccaaaagatatatccacctagatcctgtgaacgtgaccttaagtggacacatagaaagtccttgaggatgtaactaagatctcaagatgaaatcattcccgattatctgagaggccctgaatccaatgacaagtaaccttatatgaagagtaaaagacacagacagaagagaagaaagtgatgtgaagatggaggcagagactggagttgccagcacaactcagctccaactgccagcagacattagaagctagaagagaaaaaagaaggattccctgctataggttttggggggagcatggctgtgctgataacttggttttggacttctggattccagttctgtaagagaacacatttctgtagtcttacgctaccaagtttgtggtaatttgttatggcagcccagggaaatgaatacaaagggactaggagtgactagccctgtttatttatgggtatcctcatctgtcagcttagaagtgaaaataatactgctattcataaattttgcctattttggactcgactatcaaaagagagagaatcctcaccaatgcagaaagaactggatttaacacatggctcctggaaaacactcatataaagaacagtgccttctgtagaggaagtaccacctagtgttcaagagtgtgggccactagagtcaaatttgaatcctggtttgaatcctgcttctcccactcattaaccttgaaactttgagcatttatcctttagattctacactggcacataagagctaaataaatgttagttcctatttagctcaatttcagaggttattgtgtttgctccatatgcttgcttatttttgcagaatacttgtctccgcttacttatccctctccatggctgaaatggctaccccagtcccaaccttacatgaccttttcattcaaaatccaacagcagcaatcagaatcttttggtcacttatttcaatttattgaaagagagaccacgatgtgtgttcaagccagtgtgcatattcgtgataactgggccaaccttccatggctagaaagataaaggctctttgaaggggatgagggcaggaagtccatggcaagcatttctagtacactgtagcttttcacattttatatattccaacctatttatgtcttccttcatagtatatgcctccaatttcatgctttaaaaagtatctctaactttgagattagaaattcaccaatagcttattttagttttttactttccacatatactctgtgatctaatttgaatttgtttattagaatggcacttttttctccaagtaactagctatttgtcccaacatgattttttgaatagctcatacttttctcaccaatttgaatactaatactgctaacaataatagcattttctgaatgctttctatgtgccagagtttgtgctaagtatattacatgggttacttcagcttggttatattattatccacatattacagctaagaattggcatacttgggattcacacctgggtcatctgactctagagctcatacttttaattattatgctattctgataagtaatgtggatctatttttgtctcaaacaataaggaaaattattgacataactggaagtccagatgtagggcaggcttcacagttgacttggctgaagctcagtgtccccgtgattctcttggctctgctctcttccatgtgtggcttcatcctcaggctgacaatgagatagctgcagcaattccagcccccatatcaatgcacaaaaaatgtgttggaagaaaaagaggattgctactctcagaaactcttccagaaaaacaataactttttgagacactccaacaaaattttcttcaaatctcattggtccaaaatgagccacatggccattcctgtatcaatcatgagtaagaagaatgggataaaatagattacataagctcatacctgcagttaggaatgatgtcagctttcttttggcacatgggctgcatagaagtgaggataactatcaataagaagtaagtccagctctcagatacagaaaacctaaaataatagtggattcaataagttagcatttaggccaggcatagtggctcatgcctgtaatcccaatactttgggaggccgaggcaggtggatcacttgagatcaggagttcaagaccagcctggccaacatggtgaaaccctgtttctactaaaaatacaaaaattagccaggtttggtagctcaaacctgtaatcccagctactcgggaggttgaggcagaagaatcactagaacttgggaggcaaaagttgcagtgagccgagatcatgccattgcactccagcctgggcaacagagcaagactctgcctcggaaaacacacacacacacacacacacacacacacaagtaagttaaaatttaaatcaggtctgaaggtaggcagtatagggccagtatagtatggcagctccatggtcacccaggttccttccttctatctaaactatctaaatgttttgccatcctcaacacgtggcttctacctcatggtccaagataggtctggagccatagccattacatccaccttcagacaccaagaaggacaaaggattgggaaggagagactggcttctccttttaaggatgtgtcccaacattgaaaccaaaactaaagatacaacaaaaaagagaaaaccacaggccaatatccctgatgaacacagatgcaaaaatcctcaacaaaatactagcaaacagagctcaacaacattttaaaggatcattcattatgatcaagtaggattcatcttcaagatgcaaggatggttcaacataagcaaatcaataaatgtgatacatcacatcaacagaatcaaaggcaaaaatatataatcatttcagtagatgatgaaaaagcatttggtaaaatgcaatatcccttcataataaaaaccctcaacaaattgggtatagaagggatatacctcaacatcataaaggccatacatgacaaacctatagctaatatcttactgaactggacaaaattgaaagcctttccaccaagatttggaccaagacaatgatgccaacttccaccacttttattcaacgtagtactggaagttctagccagagcaattagacaagagaaagaaataaagggtatcccagttgaaaagaaagaagtcaaaaacctcactgcaacttaacaaagagagattccttcttctcaggtaatagtttagggctgcttttggtggacttacatgacgtcttcaagaatccaaggtcattccacatttctgttccactataattaacattagcttttcctaaagttcacaaactgactgctacaattctagccatcatatctgaggttccttaggaggaaaggagaagggcaaaatgtaaaagttgcatgccacctgaatccatctaatttattggaaatcaatatctttcctagaaacctcatctgttagatttctcattgaccagaactattacgttgcatggcctattacggcaagaaaatctcagggagatgagcattttaaaatgattacgttgctgtcctgaacaaaatcagactctattattaaagaaggaggaatggatattgggtagataacactatttactatcattttccatctagaatattttttgctatatgacataaaacaaagagttaattttttccaataagttaaccacctttctcagcatctttattaaataacccatcctttcttcattggtttgacatacaacatattatatttgaaacatatagaaattccaattccgataactgcaagagtggcacccgaaagaccatccttccccagattacaactataagcttttgacaaaatatcgacgacaaccattgaaagcactggagattaaccaagagcagatagaaaatggagggttattgacacttggaagaaggaaatgacagtaggcgagtttctcaattgtatagctttaggcctaagggcaaccccaatcagtgccatatctgggatagaaacctgccatcttgccaacatgaatagctagaaggaagaggttggggttaccgtaatagctggaatgcaaaggggttatgctggaaaggagagtcacagtggagaaacactgaatcctatacataagctctgtccaaatctctagttgttctctgaacaatgcatgggcaatgcagaaaccaagcagccaagttaagattcaaataattgaacagagattgcagctgatacttattacaagagacagagtttcacccaagttaactggccacttaaaaaaaaaaatcaacactctttggaggaatgtgacagaatccaggtaccctgcaatgtatcattcacgatatccaggatacaatacaaaattaacacccatacaagaatagtaaatatgacccatacttaggaggaaaggaaatcaataaagatcaatcttaaaattacccaaattctggaattagcagacaatggattttaaagtagttgctataacaatgctcggtaaagactatagggtctcaggtcacttctactctcccctcctaaaaagggtattaataatagtttatcctattaggcatatgtccacatatcctccaaacaacttgagtgagaattaaccagtctggtgaacattttttttaaaaagcggctttgggtagaaaagcaaagacaggattctgttttttgtttttttgagatggagtctctctctgtcacccaagctgcagtgcggtggcgcgatctcagctcactgcaacttccgcctcccaaattcaagcgattcacctgcctcagcctcccgagtagctaggactacaggcatgtgcccagctaatgtttgtatttttagtagagatggggtttcatcatgttagtcaggctggtctcgaactcctgacttcaagtgatctgcccacctcggcctcccaaagtgctgagattataggtgtgagccaccacacctggccaggacaggcagttttttaatacctttgtaaggaaagtaaaacataccctttccattgccaacaggtcaccaagttggcagagataactagtcaaactcttggatccccagcacttggttcagagatgcaagagttagcagctgtggaattacatggctcttttgtagcccagcttgtttatcacccttactaaaagcttaaacagtccctcttcaatgaaggctgtcctgcagcccaatcccaccctatgccttcgataccttaatgttttcaaaattcaacacagcagtataacttccatggggaatatagagaaactaagactcaaaggggtaaaaggacaccataggagttacaaagcctactacagctctgtaagaaggtgaaatgggcagccttattaacccatttctttaatctgtcatttagggaaagtggcttatccaatggttgctgcctattctgcaagcaagtttgctttggatgggttcttctcctccatcagaaaggaatattcagtgtccagggtcaatgtatcaatcactctctgtgttcttggcctcatagacacaggtaaggtcaatactttgtgtttttttttaattattatactttaagttctagggtacatgtgcagaacatgcaggtttgttacatatgtatgcatgtgccatgttggtgtgctgcacccattaactcgtcacttacattaggtatatctcctaatgctatccctcccccttccccccacccaacaggcccagtgtgtgatgtcccccttcctgtgtccaagtgttctcattgttcaattcccacctatgagtgagaacatgcgatgtttggttttttaatactctgaataatgacctgcagatgaactgtctgccttaccattgtggataaacaagggtgctgaactccctgacctcatgtgtaatgcactaaaaacaaaccagtgcagaaagcactagctctctcatttaaaggcatttctgtcactagtggaggctctggctactctttgactctcctttccattttgattaccaaggtggctgagtctcaccacattcatcacttaaccctttgctgaacaccttatgtcctcatggacactcaatggccattacgtttctatatgagacttatcaaaatacaagtttgtgtttcttaaaagcagcaccagtaataagacacactggtatcatgaactctttgatgtgatgttctgagaagaacacaacatcattttggtggtgttcttgccaaaatacatgaccccactccaatcataagagaacaatgaacaaaaccaaatcaaggaacattttataaaacatttggtcagtattcttcaaaagtgtcaaggccatcagagacaaggaaaggctgaagaactgtcacagattggaagaaaaatgggaagaaattactactaagtggaatcctggataagatccaggaacataaaaagaacattagtgaaaaaataaggtctgtagtttagttaatatattgtatcaattctattattatacctgtcctaaatcattgcacaatggttatatatggtgttgcaaccagggggagcaggtgtggaatataagggggtacggcctacaatttttacaacttttctgttaagtccaaatacaagtttatctaaaacatgtggcagatattaaaagaaaatgctctttgaagagtaattgagcaacagttagagaaatagagagagagaccgagacccagggggaaacaagaaaggaatggagagagagagagaagttgtgcaagatggacatgaaaacttggaaggggagagaagtgaaagtggtgacaagggagcaaaagcctgtattcttgtgtatctcttccttttacaagacagtaagtcattatcatacagcactctggtttttcccactggcacttcccattagctactgagtcattatgagacttctatcctcattctgctcccccatattacttctccgcctccaaccaaaatacccaagagagaagcatgattcagatctcccaagtaatcacctctaactgctcccaccaatctccatccaggaaggcaaggcccctattaacactaaggcctctctttgcccaacagactctaacatacccagtctctccatgtattccctatagtgcctgtgaggcttgcagagcaaacactgccaaaagcccctgacagctaagtggttgatgtctccaggccttccatcatgtagactgtcctagtcagataaccctactcttcccttgtcattctatagaaacagccatgaaggcagtttctgggatagtccatatgcaagcagctccaaaggaggaatgtgccctggagatcatcaaagggggagctctgcgccaagaagaagtgtattatgacagctcactctggaccactcttctgatcagaaatccatgcaggaagatcctggaatttctctactcaacgagctataatatggacagattcataaacaagtaggaactccctgagggctgggcatgctgagggattttgggactgttctgtctcatgtttatctgagctcttatctatgaagacatcttcccagagtgtccccagagacatgcaagtcatgggtcacacctgacaaatggaaggagttcctctaacatttgcaaaatggaaatgtaataataatgaatgtcatgcaccgctgcagccagcagttgtaaaattgttagtaaacataggtataattaccagatagttatattaaatttatatcttatatataataatatgtgatgattaatacaatattaattataataaaggtcacataaactttataaattcataactggtagctataacttgagcttattcaggatggtttctttaaaaccataaactgtacaaatgaaatttttcaatatttgtttcttattttgtggtctgaactctttatctcttcctgagtggaagaaatcaccctaatctttgtttggtggggaatattgtgtctttaccttttctgtgtatttctgatattcttcatattattgcatattgctcctctgggaaagaagacacctaggcataaggaactagggcaaacccaggaaaatggaggtcccagaaacttgagccacagacccaatgcccatttactgctctcagaggacatcaagcatctgtactttacatgtgaacactaaactctgcattggaagtttggagagggggagttggagttcaaatcctgccactcactcatttagacatttactcattcaacaaatatttagtaagcacttattaggcatcacctaactatgattaaatgggaaacaaaacatcagcatgatgaacaactcagcaaagccctatattgatcagggcccaagaagtaagagatgacaccctcaaattgggtaattttagtagcatttaataaaaaaaggggcaaggcacagggaaatcacaaaagatagtgatatctcagggttagttgcagctgtttccatcgtaaggcccacagggacaagagaagagacctgttaccaaaacctcaagatgtgaagacctgtatggagagcaccacatggcaggagctgtaacatttagttaagagatgcagccaaccagccaggcgctgtggctcacgcctgtaatcctagcactttgggaagctgaggtgggtggatcacgaggtcaagagattcagaccatcctgaccaacatgggggaaccccgtctctactaaaaatgcaaaaattagctaggtgtggtggtgcacacctgtagtcccagctacttgggaagctgaggcaggataattgcttgaacctgggaggcagaggttgcagtgagctgagactgtgccactgcactccagcctggcgccagagcgagactccatttcaaaaaaaaagagatgcagctagcctaccaaggattgtgaaggaggtgtctaggggaaaaaacaccctagcctcacctcacgctcttccctccctctgatctctggccagcatttcacattagctgaacagaggggcaagggagcagataggtatagaccatacaggtcagcttccccatgtacagagcagatggaaaagggtagagagtgttctggagaaatgaatggagtatatccatcaggaaccccaacactcccaaacatacagcttccatggtaagtaatgctgggacatgagacatgtgcctaaaagtgcaggggaaattttcttttcccacctctgaatctaaatggctgggcagcagaacatattggaatctattgagcctgccagccacatggacaaagggctggatttgagcctgctaatgtggctgcacttttcttagaggtccttccaaggctatgctcagtgcaagggagcaggagagacctggctgcatccatgtgcaaaaacaagacaaaacaaaaagggccaaaaaatgtagtctggtttctgacatgaaatgcacccacacttgcaacgtggcttaatatatgtcctggtttctgatcaatcagattaacacccttcagtctcttgtagaaatgagactccttcttcacagtgagatgaagtgaagtaattcctttactcaagggtagagataatattaaagctgagttagaatttgcttggggagaggttaaacctctttctaaatgagactttcttcagaatccaaaggggaagatctcaaaaagtaggtctgagaactgaaaccatctacacccacatagcttattgtcttcattaacatgattttaacattccattctctttatcagcatgactttactattccaagaaactcttgtccgagaagataaatgttgcaagcccatttaaaagtgctgaatttttcaacagatagcatcaaatgactgctactctttaagactgcttggaacccttagttccaaaccccagcttcattgtgttcaccagtctccagctatggcatcacaatccttatccaattcaaataaagtcaccatgctgaagtctcgccttaacctagacttcaaagccccataaagaccctgactttaccctctccactctcagagtctactaagactccatcaagactccagctttgccttatcaacaggttgttttggtggtcttttttagggagccaacattcaacaagtccttcctaagaggtcgtctcaggggtcctcatccagttcctaacctggctcccctgtcccttaaatacctgtctcatctctcaggactggcaggggttccagcagctggagccaagttccaatttcagtggcaccagcagtacaatgacccttgtctttggactagttccacttaaaagaacctagccttcctagctcactttatcacgagctcaaaaatatacatccaaggacgtccattttcacatccttacgtgaaatccagatgtgcatcactcacttctcgcccatattaacacaaaaattcagcttctctttgtaggttccaaaagtaattatattctcactgaaagtattagtaagcaaggtagtgtttgcaatatgcaaggtagcatatctcagaggggagaaggaagactaagtttacattcattcagtgtgcatcattttttttgtttgtttgttttgttttttgttgtttgtttgtttgtttgttttttgagacagggtcttgctctgtcacccaagctggagtgcagtggcatgatcatggcttcactgcagccttgaactcctgggctcaagcaatcctctggccttagcctcccaaggagctaggactacaggcatgggccatcgtgactgggctgattttttaaaaattatttttagtagagatgagatcttgttatgttgcccaggttggtctcaaactcctgagctcaaatagtcttcccatttcagcctcccaaagtgctgagattacaggcatgagccaccgtgcccagcccggtgtgcatcatttaactcaaaagatcccccttggccatgttgccctcaaagtgcttcctctaagcttcccctcttaatctgactttgaccccccagagaatccagcctctagcctccttcttctccctcataaatttattatgcacagttgattctgactctagtttgaggctatccagcaacatcttttttaacaaaaatagcctcttcccacaaagaaattccttcaccaaatattacatttgtagtagccaagacaattgaaaacaaccttaatgtctacctatagggaaatgtttaaattataggaattaaattcaatattatgaaatcactgtgtcatggtaacaagggatcaagtcaatttatatgtacatccatggaaggaattccaaggcatactgttaagtgtataaaacaagttgcttaaaaagatgcataatataattccatttatgttaataagttatacacacacacacacactcatggaatgaggatgtgtggattccatgtgaatggaatggggaagctaactagcataaggcactattgtaagacctgagaaaattaggaacagctctcttccaaggaatacacctgtgattctcaaactggcagtgttgcaagttgaaccgtgtccccaaaaaagacatattaagtctctaatccctaaaacctcagaacatgattttatgtggaaatagatcattccagatataattacttaggtgaagacaaggttgcactggattcaggtgagcaacatgactagcatcattttaagaagaaggccacataaaggcagagacacacagggacaacaccttgtgatgacagaggcagagatgcaagtgatgcagttgcaggccaaaggacaccaaggcttgaaaacccctatcaggaagcaagaagaggcaaggaagccctctcccctacaggctgcagtagaagtgtggccctgtcaacaacttgatttcagtattctagcccccaggactgtggatcaataaatttctattgtttcaagccactgcgtttgtggtactttctttggcagcctttggaacctaatagaggaagtactttctttggcagccctaggaacctaatccctgtattagggatccctaatacagggatatgtaccccttgccctgcttctcttggtggcccaagattatgatgttatcataatgttatgattataatattaccataatcttgggccacaaagagaagcaaggcaagggatacacattccttgactcagaattttacttccaggaatcctgacatacaaatgtgatctaattaaaacagaatcaagtcatacctccatcaaaacccataattatcccattcattctgagtaaaggccaaagtccttacagagacctaaaaatcttacatgatctcggtcctcattggctctgagacggcatctccttctcttctcccctcattgctcaagcactccaagaggcctcgcttggcctcctatctattccagagcatgcaaaatatgtttctacttctctataccacatggccagctgccttacttccttcagattcattcaaaaagttgccttttcctaggctaaggacatgaatagacaattctcaaaagaagatatacaaatggccaacaaacatgtgaataaaatgctcaacatcagccaggcatggtggctcatgcctgtaatcccagcacttcgggaggctgagttgggtagatcacctgaggtcaggagttcaagaccagcctggccaacacggtgaaaccccatctctaccaaaaatacaagaattagccaggcatggtggcagcatctgtaatcccagctactcagtgggctgaggcaggagaatcacttgaacctggggggtggaggttgcagtgagccgagatcacaccactgcactccagcctgggcaagagaatgagactctgtctcaaaaaaaagaaaaagaaaaagaaaaaatcctcaacatatctaatgatcagggaaatgcaaatcaaaatcacaatgtgataccaccttactcctgaagaaataatcaaaaaaatcaaaaaataatagacattggcatggatgcggtgaagagggaacacttctacactgctggtgggaatgtaggctagtgcaatcactatggaaaacagtgcggagattccttaaagaactaaaagtagaactaccatttgatccagcaattccactactaggtgtctacccagaggaaaataagtcgttatacagaaatgatatctgcacatgcatgtttatagcaacacaactcacaattgcaggaatgtggaaccaacccaaatgcccatcagtcaacgagtggataaagaaactgtgatatatatatacacacacacacacacacacacacacacacacaatggaatactactcatccttcaaaaggaatgaattaatggcattcacagcaacttggatgagattggagactattattctaagggaagtaactcaggaatggaaaaccaaacatcgtatgttctctcctaagtgggaggtaacctatgaggatacaaaggcattagaatgacacaacagactttgggggctcaggggaatagggtgggaagggggtgaaggataaaatactacaaactgggttcagtgtatactgctcaggtgatgggtgcaccaaaatctcacaaatcaccactaaagaactgactcatgaaaccaaacaccacctgttccccaataacctatggaaattaaaaaaaaaatttttaggttgccttttcaatgaagcattccttagccaccctaaataaaatttcaaacccaccctgaaatgttctttttgttttgtttttttgagacagggtctctctctgtcacccaggctggagtgccaaggcatgacacagttcactctaacctctacctcccgagctcaagcaatcctcccacctcagcctccagagagatgggaccacaggcatgtgccaccatgcctggctaatttttgtattttttgtagagacggggttttgccatgttgcccagattgttctcaaactcgtaaactcaagatatctacccgccttggcctcccaaagagccgggattacaaggatgagccaccatgccaggcctgccctgaaattttatgtctgccttccctgcttgttttttctccttagtacttattattatctatattgttggtcatttatcttgtttattatctgtccttgtcccagttactatggtgacataacaaatcatcccaaaactcagtggcttaaaacataaaatgacattcgcttcgcttgcaaatctgtagtctgagcaggctcagcagggatagttaatttctgctccactcagcaagattgggtggctcaaaggtcaggaactagaatcacctaaaagcgtgattgtgcctgccctgggaagacatgaacagctggactctgaaacaggtagggcactttaggtgcctggctccttgggcacctggagctaagcagggagggcacagcaggagtctctctcatctttgtgtgatctctccacatggtcacttggaatggcagctttagggttgccagactgcttggaggacttgagatctccaaaggcaagtgtcccaagagaaagagccaggcagaagctatattgcctttcaggactgaccatacacttttggtcgaagcacttctgaagatgcacctcatttcaaggaaaaggaatacagaccccacctgttgatggaggactgtcattgtcacattgtaagaagagcatgtgggatggatgggctaaaaattgctgcagccatctttagaaagtaccatctgccacattccccctgctagaatgttggtttcatgaggacaggagttttttctgtttagttcagtgtgcccccagcacctagaggagcacctggcacatacgtgtgggccagagaagatcatgaggtatctagatgcaagtgataaactgttgtaccagacccagaatcaggagcttctgagggtcacataaacacaggaagaaggcaggtttgcaggagccaaggccctgcagattgtcaagaggacaggagtgggagggctgattaggaggtgaggaaatgagtacagagacagaaacatggtcaggtgacaaattgatagccaaagtcaagttaaaattagtttttgcctttagtctgaacatgtaagagttcttcttaggcccaaagatattgtaaggtttcagcccgtgttcaggataaagcagcctttctctgattctgctaattttgggcttattcacccctccatagcattaggggagcagaagatatgaaaactaatagccagtatctatgagttaatattaaacgaaaactttggtcttttccagggctgtgctgacaaatgtttaacaactaactctccagaaaaagaagaaacaaagccttaattcgctgatttgtagcatttgcctgtatctatgatgtaaagactcttactgtggccaacttcgagtcaccaacaggacatcacggcatgtggattgggaagagatggacacccccggctctctcaagcctgtgtactggctccagcacatcatcatgactttcactttccacattcctgacagaattcgttattcttaaggagacagttcactctctcctcctccaggacttgaaatcaaactctgataacatgagtcaaattggcgttttctgttttttgttgttttttttttctgtcagcaagcgtggccaagctgactagcagtgacaagatatctacattctataatacaattgccagggaaggagaggcagcaagggctcctgaagacatgggatgctcacactcttccattctaagggcatcagcatcctgcatgaagtcaacagccttgaccaaggtgtcagtgagacctgcagtcatgactttcaagtttgttagcactgcattcccctgggagtaacagaaaatccaactgtctgacagtggctggctgaatcaggcagagacttattttcctctcctaacaaaaagtctgggtggagctgactagggccttcggggacctgggctccttctgtctttccactcagctctccatcctcctccttgttgctggatgttcacaagacagtggccccaccctcagcatcactcagtgtttctggcaagagaaggaggaaggtgaagggtacaggatgcacaccagctgactctgacccctgataatgagcacactgggaggccccatccaaagacttcagcttacatctcacggcccacagccatggcatgtggccactgttcccttcaggggaggctgagaaatggagctttcaactgggcacattgccacgccaaacaaaactgtggttctattcagcaaccaatagtgtttgtcataagtataaatcaccagagaagcagggagatacagtcagagcagaaggacacaggtctgaagacatcagcctcctaagcatgctgacagcatccactcacactgaccatttgcaaggtactacttggacaccacagttctacctatgctggaggaaatcctaggcctcccacatctgcaaatttccctttgacaaattgtgattccctctcttcagtaaagaatgtcatgaaaaggcctagatatcagtaggagggagccctgaggaggtaacctcagaggaggagcacacattggcacaggggacagacatccaagttgctcttccagacatctccttctcaaggatagttaagtcccccctcaccaacaagtccctctcaagagctgctgtgctactattctccacactgacaggacctttctccttggctggaccactctgggccagcatgtgaaacccaccccagagcacagtccacggcaaacttcaaaggatgactggatcaaagactctctagaggagggttctccaaagcttttgatcgcatacttcattattaaaacatgattacacttggggaattcaaaagatccccaagatggaaaaaaatgattaagcatatgtgcttctaatagatatatagttactatttatttaatatatgcatataatatttgctagcataaaacataggcagaaattgaaatcttaaaaggacaagctaaaaataaatagagagatgcggctggcagacgcgtagtgtgggcacacacaactgtcccatgtgaggctcatggtagatgaggccctagtagatgggccatgggcccaggtagatgaggcctggagcctggctggccgggccatgctgctggaggtgcagggcacacccgttcgtggtgttagggctggcatgccaagtgcactgcggttgtccaccaactccttcctggtttccctgatgtggccgtggggctgttcgccttcccctttgccatcatcatcagcctgggttctgcactgacttccacagccacctctttcttgcctgcttcatgcttgtgctcacacagagctccatcttcagcctcctgtccatggccatcaacaggtacctggccagccacagtcggctcaggcataaaagtttagtcactgggacccaaacaagaggggttactgctgtcctctgggtccttgcctttggcactggactgaccccattcctggagtggaacagtaaagacagtacctctaataactgcatggagccctgggatggaaccatgaatgaaagctgctgccttgtgaagtgtctctttcagaatgcggtacccatgagttacatggtatatttcagttttggggggtaagtcctgcccccactgctcgtaatgtggctgatctccatcaagttcttcacagtgactgcaggcagctttagtacacggagctgatggaccactcaaggaccaccctccagtgggagatatacacagccaagtcgctggctgtgatggtggggatgtttgctc

SEQ ID NO: 5 - DNA, 45770 bp, Homo sapiens
  allele (1)..(45770): CHST10 Reference Allele
tgaggcggtgccggcgttctggcccccaaagccggtctagcgcgccgggcgtcttccttacttccgctgccgccgccgccacatcccgggacccgacgggccgcggcgcggaggcctcggggcaaggtggggcgggcctcccgagctcccaggaccccgcgcgcttcgcccacaggcccggcgaagcccgacccgcgcggcgcccccagggccaggggaggagcctaaggacccggacgagcgccgctccagtagggtgagctcggggacgcgcaggcgggtgggtttcagcgcctgggcccctctccccgccgcggggcgcacggaaaaaccggggaacccgcgggttttgtcctggcgagccacatcccggtgtgttttggcgacttgaagacctccctagttcgcgggagtagcgggaagagccttcctcgcgttaattatgcaataagaaggcgtccttgtgcgggatgctgtgacccgcggaattattgatattgtgcgagcctacaatttacttctttcatccttggctgagaatttgcgtttgtaattgtagatggagagaggaagaaagggttcagcttgggtccaaggagcatgcagaggaaggcagggaagaaggagcatgtgcagcttcggtgcgaggggagtcaggggtgggaatgcacgttccctgcctgaggggccccggggtgccctgagcctctgatcttcgctgtcaggaggcctgtccgaagttggaggttgaggcatgcagttctgcacttctggctgggaaggtgaaccaggttttccaaaatgtcatttttgctttccaagtctgcaaggcaggaaagggttgggcagtgaatggaaagtagtgcagccaggttctggttagctcagcggcaggactgtcataacggtgggtttttgttgttgttgttgttgttgttgttttgtctgaaaaccagagtctggggctttgggccatgaggagttgggttattgcattgcttagagtgccagagtgagaaatgtctcagacgctgttaaaattaggcagctcagtttagctctggctctctgataaccaaccacctcctccttcactcttttcagtgactgggttaaaatgaaaagacacaaagagagaagtggtcttttcccttccctccccattataattaagagcttagtccatcttggctcagaattggaattcagaattcagaattgctcttgaccctgaagaatagaatctcaaagaaatacctgagcagaaaattctcttcttcgctgaaatgaaaattggagtgtttgcaaaactgaacaaagaaaggaaagaatttgtaaacatcacaggcaacttgcagttatattcggatcatttttcagtgtttgaggagttcatacaataaaaaggtgagagagagccaggaatagaaacaggggagagaggtggttgcaggaccttagagattgcagaaacccaggagttcattttcttttcatacacttctggataacctggatgtgaggaccatcaaatgccgtacatgatgtttctaacaatgatggaccacatatacaacagtggtcccataagactatactaccttatttttactctaccttttctaattttagatacacaaatacttaccattgtattacagatgcttacagtattcagtacagtaacagcagtacaagttagtagcccgggagcaatagatgattccatatagcctaggtgtgtggtcagctgtaccatatagcctaggtgtgtggttagctgtactatctaggtttatgtaagaacgctctgatgtttgcagaagaacatcgcctaacgatacatttctcagaaggtatccctattgttaagtgatgaatgactgtatataaagcttaatctttcaatcaacataataggaaattgcttttaattttagcattgagttcttagagtaaagggaggcagagagagaccgtgctgcatgtgtcccagtcagcttgggctttattgtatgttaaatgagttgtatgtttattttggtagatctcctaaatccatgatctaattccatgactttggcttgtttctggttttttatgatatggcatttggctaaaattttccaggtgctaaaggtgtaaggagtacgaaaatccagagaacattttgcattggaagaattgatcatcttgtataggaatcctataactatttcaaacatacgaaacaggcataattggatttgattatttttgctacaaaaaatgtttcatttttcacactaagttacatggaagagtcttttaaacagctagtggttttggtacatttagaatattcatttaccaagaaatccaaatataacctgcctttgtaagagacccattctgccaaatatatttgaatcatcaaaatggttcactatttccttcctaagtataaaccaagttgtattaagtaagttgatcttgtaacttttaataatgcttttttttttttaattttcctatccagtgacaagaggaaccaagaacctcagttcaggggaaacacagcaaggaaatgtgagccccaggctgcagaaggtacgtgaaggagaatgtgagctcatcagttatttgagcatgccattcagtattgttcctgccttttttcttgcctgtgcagattgtaaactcttgattaggagtatgtaaatgtgtgcttagaaacgtttccttaaatataataataggagcatgctctgaggctgggattatgtgagttagtacctgctgagacctgtgcttggtacagagtgaaccccatacaggtgtttactgtatattattattattgttcatgaaaacctgtcttaactacaggtgtatttctcactggacagttaagagtgttttcattctcctaactaagggtggttaatcgttccaaggcggtaaattgtaaggatgacaacagagaagacaaaggaaatttctgtacgcagattgagagaaacctttactatgaatttgaaagtctcagtgacatgcaatagaactttatagtataaattcatatgccacactttgcattatggagttgtaatttaatgattctattgatagggtaatgcattgtagttcagaatgtgctcagggttgatggtgaaatgtccccgtttctgcagccctggtctgtctagttctcatctcacctgtcatcctcctggggttaccagttccttgtacattaccaggtttttgtgtgtgtgtgtgtgtgtgaagtttcctttagagtctggctgtgttttaaaagttgagccctggacatgtgatccctggtatgtgtatgaggtgaggttgtcagtaaagggccattgacaggcctcctcatctgacccacccctgtccctgcttgcccactctgcatgaggaacactggccttcttgccacttttggaattctgggacccagaccacagtctttgcccaggggtctgcatggcttgctcccacaatctgtcctgccttttctcaacatcctgcccatgcccttgtttattagccactgcacctgtcacctggcttgatcatatacattgatcacttgatttgtttatggcccgtctatgtctgttagtaggaagcactgtgagagcagggaatgtgtgttgctatatccccagggcctagaacagccccggctcagaggagggctttggtaaatattgctgaatgaaaaaatgtctggaaaaagcctggttaagcagagttaagtgggcttatttaccatgggacttttcagaaactttagtaagtgaatgcgcatattaaaagtggggcctggcaggtgggaggcaaactcatcagcagagtaagaaaggcgctgtgcttctggatgacaactcagacatggggaaaagctgctggcgggaatggtattggcagctgagcaaaatgaatttacaagtttccttttcaaaatgcaggggaggaaggatttgcatcaagagatggtaatagtaacatttccattgttagttattacaaacatgtacaatgtgtgctatttatcttttatttaaggtggggaagggggaagattagggcttcttgtagattcttccttccctgaccctgctttccccataaggccttaagttcttcagctgccagttcatccttgtgggttgaactgaggaaccaaaccctctggcttggtttcagatcctgacatcttgacttgtgaaaatcccatttaatgactggaagtaggaaagctctgaagatggatatgcagattctaggggtcaggaggctctgttcagggcctgcgccatgaccgaagggagggcgtgtaggggctcaggttctgctcccaccattagctctagaggcactctgagagttgtcttggctccttgaacaaaggggagttaattacagaaaatgccaggctttttaaaggccatttgtcccctagctgtagggagagcagcagcccttggcagagccctgaggaaagactctttatgtcaggccgcagtcctcttgtagacagaaataatgagccttggtggtgtcatcctcagataggaggcaaaccccatggtgaaattctgtattcaaggaaacaatgcagagaatggggcggacttagaggagctggggtgaagtgaatttggaatgcctctcttttaaaaaaaaatggggcagagttttgtgttgttttccaaagtcagacaaagcctgattctacagagtctagttaaccgtagatgggagggctgtaaaggagagtaagatgaaggcagtgatggaaggtcttagattctaattaaacctcttttagctgtgtatttggaacacttgtaattcagagcatcaatagactctcgttgactagatgcttttttgctgccaattttccttcttaagatggaaggaggtggtgggagaatggcgtttatgccagaatgcctagagtctgcattttaacaagatccccagggggattcatgtaggcattaaaatttaagaaggggtgaggtcctggaccagcaattctcagtcccagctgctcattagagtcacgaacagagctcttaaaaaatgcctgggtactgcctccagagatttgtgttgtcttggctggggtattcttggggcccggggtatcactgtatttcttggaagtttcccaggtaccgccccagacataaagccagacaccttcaggtagatgtctagattcagaaggcacataatcccgaagcaaatgacaccatgcttagctgggcacaccactctttaggattcatcaaaacccaccacaccagataatgtggatcctcgtagctcatccgctggcttctagagccacagccagagatgatgggatgtggagcacccaaccggggttgcttgtgccgggttagaattctccctcctccatgaatgaaaatgaccttgagactgggcagtggctgagtgggcatttgctttttgtacctctgactctgctgctgaagaaactgtttcaaaatttaaatcagatcatgacatcaccacccctcttttcatgtaaaactctcttcaggggctcccattgcttgcaaagaaaagaccataatagccctggcaggccccatgttgtctggcctgcatctgcctcagcctgtgccccagaactccagccacatgggcctgcgtttagttactcaggggcccattcccttggcctggaaccctgcccttcaccttaggtaactgtgctgtcccagaccactctgcccaaggcacatcccattgtattttctccccacagcaccatgtccctctcacaccatcaagtaccactcctcagatagcttctttccttcgtgtgggcctgttagacgacaagctctgtaaggacaagaactgtgtgtgtttagttagggactcagggtcatatccttggcagctgttttactgcatgaatgaatacactggatactggataatgaataatgagcttgaagtcattatttttaggttattttgtccttaaacttgtatgcacatacacacctactcatgtttgagtgctgtattttgtaaactgtagagatattggacctgagggaagtgggtattttgagagagtactgggctgtagtcttactggttctgattggctcatgtaggatgtgacttgtagaacaagtcccagttttctaaatttttaactaggccgggtgtggtggctcacgcctataatcccagcactttgagagtccaaggcaggtggatcacttgaggtcaggagttcaagaccagcctggccaacatggtgaaaccccatctctactaaaaatataaaaattttccaggtgtggcgtgcctgtaatcacagccactcaggaggctgaggcaggagaatcgcttgaacccaggaggtgcaggatgcagtgagccaagattgcaccactgcactccagccggggtgacagagagacacactgcctcaaaaaaaaaaaaaaaaaagaaaaaatgcttattacaaatatttaaaatatgaattgtataaagtacaaaaagagctcttactgtcctctcatgattttattctatgtattacatatatgtgtctatgtttgtatatgtgtgtaatcatatatatttcacacatacatgatttttttaacaaatgggatcatacattccatcctgcaacttgtcttttttgtttactggtatatcttgacactttggatatggatctatgtcattggcttgcctttcatcatagagttttatttgaaatgaaaatgtttttggacttcggcatgatttcctaaaccccccaatcaatgtgttttaagtagtaagtgtatttgaatgcatatacatgctgtggcttagatcattttgttttcaaataatactgaagtcctcatagcatttggttgttttctagtctcagttaatggatattaaacatagaactgctctgtggagactagagaaatattttgaggttgaaagggggcctcattcttgaaaaagcctggagaccctcagggagagggttgggcaggctgcctcctgaagtacctttccacattcctgagttctagtaagttgctcaattgacacagtcattcagcaaatagcaattgttggctcatggtgcgccaggcactgtgctggtccctgctgtcctgaccagcatgagcccatattctgcaaggagagcaaatggcacatagcgagagcatctggactgtgctgggtgtagtggaggaagtggagcaaggtcaggtggcgcagagcggtgctgggggtgccacctgggtggtgatgaggcagagctgactcttcctctgctgcccatgggaaagggagcaggccctgcttaccccgagtgtacaagaagcccagtggccgggagcagctcctcagagagctccctcctggaccccgcagtgactgcccacaggctctgtggcctgcaaggggctctacagccagatatgggcatgctggcaggcagctgtgcttgaaatgctgataggggcctggggtgtaatgctcttctcaagagagtggttttggcagggctagggttttgcccctgaagctttgcaaatccacatcccccactggagtctccacgtgtcctggtaccatcccggggacaagaagcagggaaaaagcaggggaaggaggtgggaaccctgcagtccacccttctcctatcctaatggagtggccagggaagggactctctgtatatcttagtttagtaagagtttgcagaagtcaagttaaaaatggattttttgaaaatgaaatacccatgtgaaagaacacattggatgatacatggtcagttgcatgattgttgagaaggtcttctgactgatgagtgtgcaggtagctgtttgttcctgtggatgaaaaatgggagcccgaagagctcttcattgacacacccacagccacctagctagggagagggtgagtgtagaccagtccctgacctcctgcccgggtgaaagactagctacggagacggtgagtgcagaccagtccctgaccccagcccaggtgaaagactagctagggagagggtgagtgtagaccagcccctgaccccccgcccagctgaaagaagctaagagctcctgacttttaaatgaaaatccaatacttaggaaggcacatatggcttcaggagagtgcacctctcagttttcaactcatgtagttggagaaatcctatccctaggccacctggcttcctggagaacagaagaggtgctattcattttcaggtaaggcttcattatcttcccactttacctgcagatgagctcagtgggcgaaatcatattacattccttcagaagactagttccattggaaagatttgattcttaaactataaaaacctccaaagtgctgtcctgaggccgggcgagggtgatcaggggttggaagcctggagggaatgagcagagcaggcagtggaatatgcagttcccaggtcctcccgccacatgctctgcagagtcagcgcgtcacctgcaggagggaggcagtgcctcttatcgttgttccctttttcatagcactgatcctaggagagggtgggttgcaagccccaggacactcagagccaggacctgtctgtttagaattgcatgcaacctgcgtggtacatcctgttccttttactccctccccaacccaccctggtgcctctgctgcttggttagaaatggcctgcagctggcatttttcaggggggtgctctcactgtgacccatgaggatggacccccctgagtgcactgtcttagagggctgagctcagtggacttggtactgctgggccctgcatcctctggccacagtctaagcctcagtttcttgaagggaagttagcagttgctggaataagagtgtgtcttgtttttttctctcttcttggtgtagaccctactgtcgcattaatttctggcaaccacactgagaaaggtgtagattaagctggaaaatcacgaagagtgccaagggattggtcagtttttactgggggtctgcaccaggccaggtgggtgctggttttttgtctacattgtctcatttaatcctcatggccactctgaggtagtggtaggaggagggccttctattagagatgggacattgaggcttagagaggttaagtgacttatggagtcacagagctaatgggtgtgagcagggatttgaaccaagtctggggttctttgtgcctcactatctctgacatggagtggcggaaggaggaggggattgtgggatggagacaggagacaggacagctggcttgcaaggaatttggcatgcccctgctgggtggtgttgctgataaactacagtacactcggttaaatgtgaagttcagaaaacaacacataggtttttgtttttgtttttttttagtataagtatatgtaatatttgggacatactttatactaaaaaaattaactgaaattaaatctaactgggtatcctgtgtttttatttgttcaacccgacttggggaacctgggaaggacactgggcctcatatctgggcacaaaaaatactggttttgggggggagtataagtatgtcttatgcaatatttgggttatacttacactaaaattttatgttatctgaaattcaatcttaacttgggggatgtcctgtatttttatttgtctaatcaggcaaccctattggtgaccccaggaaacacacgaagccttatacacgggcacctgagggtggtttgcgagccatccggagaaaacccaggcagcttggcaggtggtgagctccccactgcaggctgtattcaggtgtggccggataactacgtggtgggtgtgtcatggatcctatttgcattccagatgcctggttcctgtgagattctaggatgtaaatgttgagacaaggagagtgattcacctgggtcttcatggagctctgacccacccagggttaggaggctctctctgaaattatttgccatcagcactgtgttgaggggaccacttctccctgccatgcagaagtgatggatggcctcagtcagtcggtggaagccagctcagcccagggtcttgtctgtacgtggagagctttggcttgaagaagcactgtgttaaaggtgaaatgaaacacactttcttgtgtcacctgccaagaactgacagtgacttcccagttctttatgtgcctcctgcaggagagtgtggcttctgtgccaggctgaggaccgacatgccccgtgttgctccctggctgtgacagcatgaaaaacacccacctcagtgttctacccaggccgctgctggcaagtgggcggaggcgagaagcgtcagtgttcattcctttgcttttttagagcttctctaggtgtggctacatcttgtcagccagtcagaattttaaacacagccagctcctaattgccccagcatggcttctgcccactatgaatgaccctcagctaaggcctagtccttggcaggcctcttcctgccacctgcttccagaccatcgtgggagctcactgggaccttagcctgggcccaacaggagtcagggatcaaatgtgcaaaggagtcttattctgtgttctgagaacacaaggaagtggtcttctctcattatcatgtctctccattagggtgttctaaatttgattttattattgaatcaatcatttatattattaattcaatatgaaatgttaaatgccaagtcaaactacctattgtagcagtggaaaaaaacggaaatatttgtgctgatacttactgactgaaatcacctgtcgttttcattcctctttgttgacttgatgtatttgtaagcagcaggggcatctcgcttgtgttttccaggaagagtcagtgaatggctgcggtgtgacaacatgcaccaccagtggcttctgctggccgcatgcttttgggtgattttcatgttcatggtggctagcaagttcatcacgttgacctttaaagacccagatggtacgtatgcttcatggtggaacgaattttggctaatttagacctagctgcaacactgttcctaggtacatgcatagatgacttctgtcacagagtcaaaggactttcatgccagcagggaccttggaggtcatggcctccgttccttcatgttacagaggtgtgaggggaggtagggtgggaggggctggagggtcttttcaagcatctcctctggaggaaggaagctgctctttgtggctgaggcctgggtggtgcctaggagcaaggagcagggtctcctcccagcagcacagtggccttatgccttgcagcagggcgcctctcaggctcgcagttgggaattctctttgcctcatgtcatcatgagaggtgcagcctcaactgcttggcatgcccgtgtggtggccacatgtttgaaggtcaccctccatgcagcggaggagggtcatttaaatgtatgtcttcaggttgtcttggaggctttcttagctctcctttactgaacgtaggcattcagatgaggacggataaagagcgccaaattgggtctcagaatgctgattctacttcgtgctcttgtcatttgcttatctacatcacaatgtttcttccaccaaatggacaccctgcctgctccggcaccgcccatgattgccctgagcatggtgaggtgctctgtggtctgtggagtgctggatatgtccaaagaggtgtgtgatatgctctccagccccgaggccacttcattgagtggccaagcaggcaagcacgaggaagccagacacatggagtcattgaagtcctcatttgtgccgtggattggcccattcctttaggctgattgggagatactggggaacgtggatgagcacagcactttgctgtgctctgcaccgtactttgtcctcctgccgatggtggccttggaaaggggcagttagagatgcctctgtgccagcagttcttcctggaggctgcactgacctgtgctgtctgtgtgggacaggcccctgctccacctcacagagctcccaggcatgtccctggctgtgtcaaggactgcccgatgtcctacacctcctgccccatcctctctctgccccaccttgtctgcagagggacagcaaggttagaagggaggtctgcagggaaaagagggacaccctgaaattagcccacatggtggttctccccatgacagttgttgggccctgattggctgtcatcacatgtcctgcctcatcctccaggagccctggagagaaacctgtgaggtctgcacagcctcgggaggtgatattacacctgcaggtatctgggcaggtgtcactgagcatgacagctcacgcccgggactcggggttccgtcagcagagcaagggtcgattcttggagggttgctggaatgtgacacgatgatctcagtttgacagtttggacatttccatggcagcttcagcacagtgccatgccactgagagatccctcctgaagccctagagccgggttctcatccccgcagcacttcagaatcacctgtgggactttacagacctgctgctgcttgagacccagtgaaggagaatcactaggggtggggcccagttgagaagcacagtggtagatcctagctggagaactgaagagaaacagagctgctgagaataagaaataggtgttactcaggattctcctaaatgtcacctcctggtatggaaggcactcaaaaggcaggtcatgaggttaaattgtttatggtttattttgcttaaaaaagtaggagtagatgtaatacattttagtgagacttctataggtaatagttaaataagacttgtgcctttgtgttttactgttatctggcagaatggcctctaaagaatgccttgtttcccagcggcatctggtaaatgaggtctcattctcctttgatgtatcaagttttgtgctgaatgttttcagtgtagacactgatcctggaagctaagcaggggtaggcccggttagaaaaaaagcaagtgtaggcgcagaacagggttttgtgaagcggagaaaaggagtggtaaggagtgttaggagataaaacctatgaagaaagatgaagggctttcggattttacacctggagaggagcaccgcagcggtccttaatactgcctgtgagatctttccagccggctgccttcaggcgagtgaaagggggcactttccctgccctgtgagatctggtgtggtgtgtgggtgctgggtcactgagatgggagtgctgcccctgaccccgaggcaggggctgctggtggtgaggatgctgttggccgcacagtgtgcagtgaactcagtgagaatcttctgttgtgggcccactcccgttgcggggtgaccaccacagcactacccagcctgcctcactcgcgtgagatgttacctaattgtcccaagggacctggttaggttaggatcctgaaggtggatatccgccagctgagttctggatgcaggatgcgagctggcacccagcatcttgccagtgcacaaggacgctgggctgaagcatcaagagcatttacactcagagcctgcccctgcaggcgtcagagaggccctgggctggggtggtgtaggcctctcccctggagcctgcccttccagcactgtgctttagagagtgtgtcccggagcctggatcttgggcagcacaggaacccctctaagctcgtggccataaagggcttctcacatgttggagtttatttcacacacgttcacggtgtttttgattatgaaccagaagcccattgtgaagtgtcaagaccaggaaataacagacacggcagtgtccacggtggggagttccatttcctggaaagtgcgtggagaagccttggcctcagtgctcccgggctgctcctttcagctctgtcctctgggacagggccagcctcagaacccccatcagtggtgtgcatgttcttctcacctacctgcctttcccggtttctcctgccactggagcccctaggaagagcatggttgtcgtgagttgctgtttaaagcaacacttactttttttagtgttacagtttctgttcagctcagcagtggagccagtgatatttgtggcaatgatttatcctcagttagcaaatttcagtatcatattgaactaggatcaggtgttgtaactagactttctcataagaaaataaatccccctcagcgaagggaatgtgatggaatcatatggcaagactcaaaatgatgcccttgtggacctggtttgtgtttgtaggcgctggtttttcctctcctggttgacttcctcattggttctgagccgcttgagggcagagcctgtgatgtgaaggtctctgcagccttgaccatctttgcatgtacttatttgccatctgcggatactctccagtgaaatgtctgggtgtatcgtacctattttctaattagattggttggttttttaattgttgagtttgaggattctttatatattttagataggagtccttggtcagataagtggttcataaatattttttccctatctggagcttgtcttttcctcctcttcaaatgggctttcacagtgtagattttctctttggttgttttttaaaaagattgatggttttatgtttcacattcaggtctgtgatccactttgagttcattgttgaataaggggtgaggtttggatcaaggtttgttccgtgtgtgaatgtccaggtgccccagcaccatttgttggacagactgccctcctccgctgaatggcttttatggctttgtcaaaaggcatttgggcatctttgagagcttctatttctggggcctctgttctgtcccatccacctgtgtgccttttccttttagagaagacattcaacctctctgtcttccagtgtacagtgccaaacaggagtttctgttcctgacaaccatgccggaagtgaggaagttgccagaagagaagcacattcctgaggaactgaaggtgggcacagccaggccgtggtccttgtcctcttgaacacggcacccttgtcgcggggagctggccttcccctgtggctggttccgcttgtcatcacgtctgcgttagagccttttcctgtgttacttctccatgttagttcaccttgttaatttccatttgggagaggcacaggtcacgtctatttttgtgcccctcacagagctctgtgcatcagggctgctctgtcactgttggttgtgcagcattcctgaccagctgaacatgagccttgcctggggagccgagagtattgggcagggtcaggaggaaaccagaagtgggagaagacatctcacccagtcatggggttttagagtgaaagggggccctggacagcagaacaactaattcagcctccaaattgtatggatgagagaactgagcctagaaaaaaggtggatcctccacagtcccatggagttcctggcggagcccaaggctgctgacttccacccagcccttgctggcttgacattctggctccatggctctctgcaggcttcttgtgcacctaaattcctgatcattccctagctgggatgaggggtgcactctggaaggcctctcacttcgtaacccccattctggatctagagggttgaagttgcaattgttccagaaggaatgaaatgggtacagcgagccctaaaaatatttttagcccagaatcaagccgtagaggttgggacagctcctatccatgggtcacagtgtaaggatgataaattagaactcaataaacatagaaaacatacaccagtcagtagagtgctgctggaggttacttctcgtaggacattgatggaatggaggccaagtttacagaactctgagacagcctaaatgttgcttttaggttgaggcatcccagggtaagaaaataatttggatggggtacagaaacgaaaccaaaaaatcttatgggaaataggagagtggctttaataggatggatttaataggaaatcaaagttacatggataaaaacaaaggtagggtaagcctttggcaaagtgtcgcaacaaggttccctcaaggatgccataccctgtgaggaagagggtggtcatcttggtgctccctctccgggtggagggtgctcccggagagattgccagcctgcaggagtcattgcaaataaaaagactgcgcctgaatgtgctttacagtttgcagtgtactttactgggtttcaatctcattggtcttccgagccgccctctgaggtatatttttattctgtttgcatttgggaaacatgaggctcaaggaactgtgctcactgggtcagtatcccctggacagcaagttgtgggcctgggctttgaactcagtgtcctctgtgcccctctcttacccgctgccccagtcattctcatgagactcagatgggaggtgagggaagtgggggatgtcagaggtgatgtccgctgaggccacatgccgttaggtgacaccaaaactcagcatgtgtcttctcacaagaaaggggatttatcaacatgatcagattctgtagctcacctttaaaagtttattttggccaggtgcggtgcctcactcctgttatcccagcactttgggaggccgaggcgggcagatcacctgaggtcaggagttcaagaccagcctggctaacatggtgaaaccccatttctactaaaaaatacaaaaaaatagccaggtgtggtggcatgtgcctgtaatcccagctactcgggaggctgaggcaggagaatctcttgaacccaggaagcggaggttgcagtgagctgagatcgtgccattgcactccagcttgggcaacaagagcgaaactcggtctcagaaaaaaagtttactttgtgcatggtgtagccgaatgtttgaatggaaaatagaaaataatatttgtctttaagttggctttgtatatttccaaagggaaaaaagaaaacaatgctcattcttacacacaattgaacaagaaatcttttttctttagctgggcatggtggcttacgcctataatcccagcactttgggaggctaaggcaggagaatcgattgcgcctaggagtttgagaccagcctgggcaatatactgagacctcatctctacacaaaatacaaaaatcaggtggttatggtggtgtgtgtttataaccccagctacttgggaggctgaggtgggagaatcacttgagcccaggagttggaggctatagtgagtcatgattgtgccactgcactccagcctgggtgacagaacaagacctcgtctcttagaagaagaatttttgtctctaatgctttgctaaaagaaaagcaatatctaatatcttttctttgttcaaagaaaagcagtatctaaaagtgcagagttttctgcattttctaaagggaacttgttgggaggtgctctctcctgatgcgctgttcttgagtgccatccatgatcagggttaggtttggaacagagagggaggagaagacagagaggctcttttgggataagtgagcaagaggtgggatggatgaggaaatgaggttaaacgagacccgttcttgtaagagcaaggagagtgcctggcgtggctcctggttttccatggtgggtggagggcccgggcagccgctgatgccctgtggggaggaacggaggccactctgcaaaggggcctctcgcttccccagtgtcttcatctcgaaaagcaggcagtcagtagcccccaggatgctcttcccaccaccagggaatcccaggaaattcacttaaacacacaagggagaaagcatcctggccagaggtcatgagtgtaagagagtttggttacagtagatccataaaggaagagctgggtggggggccctgaggggggacctctgtcatcctgatagttccagcgtcccggttctagtgtgttctagaagtcttatgtccttcccattttctaactgacgttgtcccctgggaggacaggttgttaaaactaccctataaatggatttcctggcaagcccagtgcattttaaaagatataacaaggatatttgggtccattcaatacaattatttggaaggatcatctgctttgaaattttgggaagttctgtgtagctttaagagatagatatggccgggcgtggtggcttacgcctgtaatcccagcactttgggaggccgaggtggcggatcacaaggtcaggagatcaagaccatcctggctaacacagtgaaaccccgtctctactaaaaatacaacaaaaaattagccaggcatggtggtgggcacctatagtcccagctactcgagaggctgaggcaggagaatggcgggaacccgggaggcggagcttgcagtgagctgagatcgtgccactgcactccagcctgggccacagaacgagactccgtctcataaaaaaaaaaaaaaaaagagagagagagagatgtagcagctgaagccttaaaaatgctgagaaacagggccacaactagagggggccgatggggttggtggaggctgccctgctattcaggaatgccctcaggatgcctccagagaacaaggaggtgtgagcagcaaggggactttaactcaccgaggacagggggcctctgagcaacttctgtgtgtactggcacatctccctgtgccccctccaacccatgcacacacaaggcctctcacattacaggtattctcttaggttctaaaacagccctgaaaagaatggaccagcatgtagaatttgagctttttcatctttttccccctagctagaggattccaaacttcttactttggtttttaatttcttttttcccccaagacggagtcttgcttgctctgtcgcccaggctggagtgcagtagtgcgatcttaggctcactgcaacctccacctcctgggttcaggtgattctcctgcctgagcctcctaagtagctgggattacaggtgtgcaccaccacacccagctaatttttgtatttttagtagagatggggttttactatcttggccaggctgatctcgaactcctgaccttgggatctgcccaccttggcctcccaaagtgctgggattacagacatgagccactgtgcccggccttattttgttttttaaagtcaaacttctctccaaagatctgaggaaccaagcttgcattcattttccttgcccagcctgccgatcgggctggtggagaggctctgaaggcctcatgaaggggctggggatagtgggtgtcactctgtagacagacaaggaagggaagaagagaaggctccagatggaaaggaggggatagaccagcaggagcggctctgcttggcccggtcctgcctcctttaatggtccctgggcctcttctgctctgtgtcacctgcagccaactgggaaggagcttccagacagccagctcgttcagcccctggtctacatggagcgcctggaactcatcagaaacgtctgcagggatgatgccctgaagaatctctcgcacactcctgtctccaagtttgtcctggaccgaatatttgtctgtgacaagcacaagattcttttctgccagactcccaaagtgggcaacacccagtggaagaaagtgctgattgttctaaatggtgtgtgtgggtctactgaatgtccactgggaagggtcttggtggccggtgctgaggaggctggggaggacagcaaggaggagtcacaagagggctggtttgacctgaagggactggtggccgtccagacaggcctgtttttgttgtttcctgttagtgttgtgccttacaagttagtggggctcgtttagacaccgattcttttcaaaggggcacagccacagtccagctctcctcacctgtcacagcagatcctcactttaggtggctcgcccacccccaggcccccctcctttgtctcttcaggttccctgtgctgatggttatagtcacccactctgtccgacatccccagggccccacactcgcagagccaccaggaagcctcacggtcaccctctctgcagtgagaagggctcacactgtagagcctgggaggggagccctggcccggggcctggagcctctttacctgcagaccaagcgttctgtgccagcgagcaggaagaaattgtaccccatttcacactaagcatctgtgttcagaggattgagtcagcttgcttcaggaaacctgatgtttgctagggaacaaattagatcatcacaaagtaacctcatacactgcagttttgattactcactactctttttagagatgtctatttatttaaattccaattagtctgaaccgatcctaataattatgggctctgcttatgaaatttagcttcagacaggagttagttccagtcaacagcagtgggactcctgggtcagaaatcggattttggggcaccatgggtaggtggccctaaggctccatgtcctgcttgccactcctgatgctgcccacagagtcggtggtcactcctggccactgtttggccttcgcaggggttggctgggagagagaatggtggcacctcatcatctggttgtcacatataattaatgtgcttctgcagtgattggatagcatgttgggttttcagaagcagaatgaggctgcaaatcgaattgaaaacaaggaatatacaaaggctcacaaatcagccaccacagtgtgaagcagcatactttaagaagtaaacacccacttagaagggcagcatagaaatcagagtgggcttgctggatcatgtaatacagaagcgggtggtccttgtggctatcttcggtaaccactagtgcacctggatggggacaggtgcatgaatgggcccatatgtggacccacagagctggttctgtcattgtccccttgagagcagtgctccccacgcctagtttacagccatccatagcatgtaccgcagagttctggactgggctttaaacactcgggggaggaatcaataaaacagacaagactgtgtccactggtcagatggcccagggagattcttccctgccaggactccaatcttaaccctaccggattaacacaaagatggatattaaggcttacagaaacttggagaaaacctcagcatactgacagtgtatttccatttgtctgtattgagaaaagagtgaaaaacctgctcagccaccaaccctaggatggtctctgcccaagttccattcagcagcctggacctgcactggtccctgatgacagaccctggctgttggcacggccctgccttctcgacataccttgtcctcttttgactcctgtctcaaatgtatcacagctcccatagcttagtcagatttttccagcatcaaaaggtctttgctctttgccagcctgggatgctgctggggtacctgagagccactgtgggccaggggcatgtggtgcttggagagcttagcctgtctatgggatggggctgtgaagctgctgcgggcatctgttagcatgacgttccaaagtcctgcttctctggcattttcccccagtctcagagtagagtaagtgttgctggtgttaggagttctgtttgcatgcagcgatcttcctctaatggcagatttagcccagttaggtccattgccaggggtaggcactgccagcatttccactcctgctccctccccctcctccctgaaatcatcagtttcctctagttggcttatggattcccagaagcttttcttcactcgttcatcctgctggcagaagcagttgaaattcaaagacctaaacttggatattgggggtgggcttgtcatgcacacgtggggaacatgaggcccaaggtaaagatgaggtaaggacatgcccttctctaaggggcgtactggagcagccaacctgccttcctttccgtttacttcccaggagcattttcttccattgaggagatccccgaaaacgtggtgcacgaccacgagaagaacggccttcctcggctctcttccttcagtgatgcagaaattcagaagcggtgagaacagcttcctcaaaggggaggggggagtttttgtaaacctgagaagaaatttggggaaaaccccaggctgagttctgtacttggcagattgatcggaggaccacagagggctgtcggtttgcatcagtgagaggcagctaagctacaccccccattcggcgcctcaaaactctcagttccttctgagaatttccagccttaccttcacacagtccattaacatgaaggtgacatcattttgttaatagaaattagcaggcaactttgttctgctttggtaaagttttatagattgcttgctgaatatgatcttttctttataagaaagggatttggattgcagagatctcactgagtatttgattctcccagaggcattgtgcccactgctgtgggagctgcccctgcagtggttgtgtgggctgcatccagcatgggcagggtagagagacggaacccctgatcgcagcaaggacggagtccaggctgggcgcagtggctcatgcctgtaataccagcactttgggaggccgaggtgggcggatcatttgaagtcaggagttcaagacaagtgtgactgacagaaaccccgtttctactaaaaaaaaaaaaatagcccgctgtggtggcacacacgtgtagtcctagctactcaggaggctgaagcaggagaatcgcttgaaccctggaggcaagggttgcagtgagccaagatctggccaccgtactctagctggggcgacagagcaagactctgtctcaaaaaaaaaaaaaaagaagatggagtccttagctaatagatgagaaagttctcatgtagtagctctcaggtggcccaggagagcaaggctgaaaaggagtgaggatgcaaaagcagcggctcacgtcaggtcaccagctggattttgcctcctgggtctgcagccacctgccttgcatggcgcctgacctgcatggcacctgcccatccttacaacccttaccagagatgctcctggtgaggagtgtcctgctgttgccctgagcactcatggggcttttgtgagactcagtgagtgaagacacggcaaagcacagagagcagtttctggcctgtcgtaatcacaccgtgttctgtgatgtcactgttgtcatcgtctttgtcatcgtcactgctgccggccctcctccccagggccatgctctgctgccgcccgcttgcagctcacccagacctgctcctgccctctggagcgtgaagcctgactctctgttttctcttgccccccttcccctggcaatttgaattgaacttttaaaaatatgcccttaaagtaactttccctggcaccatctattcctgactcagagttcctgcccttatgattttctgcccaggaacaaaatttgtaaacattcttgaagttttgaatcattcaagtaaaacagaaggtagattaaatagatgtcttcacagtgactgcctacaatgagtactgtggccttggacaggtaaggttttccaagcctctgttttctcacctgcaaagtgtggtaataacaggattaatccacaggatcttggagtagattaagagacgtgtggaatgcattcatggcagcctcggcacgtgagggtcccatacacagtgctgcactccgctcattcttccctctcccgccccctcagctgtgacctcctgtggcatcaagttaacctcttgttcgtttttttccttagattgaaaacatacttcaagttttttattgtaagagatcccttcgaaagacttatttctgcatttaaggataaatttgttcacaatccccggtttgagccttggtacaggcatgagattgctcctggcatcatcagaaaatacaggaggaaccggacagagacccgggggatccagtttgaagatttcgtgcgctacctcggcgatccgaaccacagatggctagaccttcagtttggggaccacatcattcactgggtgacgtatgtagagctctgtgctccctgtgagataatgtacagtgtgattggacaccacgagaccctggaggacgatgccccatacatcttaaaagaggctggcattgaccacctggtgtcatacccgactatccctccgggcattaccgtgtataacagaaccaaggtggagcactatttcctgggcatcagcaaacgagacatccgacgcctgtatgcccgtttcgaaggggactttaagctctttgggtaccagaaaccagactttttgctaaactaatgcataagacctatgaattcaaatatctttattagacctggggctaaccaggtgaagatctgagcccagaaatgacccttcctccaccacacccctcctttgaggacgcccggggtctcccacaggcctgtgagttgcctcggcatatgacgcagaaccccaactgttacaacttagtttggatgtaagatgctctgaggaccctgcccacacccctgcgtgcattaggatgtcgctggcctttgctcacctcagaggggagaaaaggctaaagatttgcagtttgacagcccagcagggaggaagcatcacacagcgttaggagccgtttccttcaggtgttaaggaaggggatgcccctgaggttctcctggctagtcagggtggcttcacccatcactggtgggttgcaggaacagcacccaggactctgaggagggacagagaagcaagggggctgctgaaatcgcagagacttttgcagcatcagatctgaggagtaaaacggcacctctggccttcatcttggtgctgcgacaattgtggaggcaaagcattctttctgtgactattttgttcctgtagacagtcagcgatggccagagggtggtgtggtgtccaggggtccatctttccagaatccatgcctgtgtaatgctggtccatgcttctgaacctgtgtctgccaagcgcctatttcattcagcacaagacatacgattttagaaggtgaggggaggggaggctttttctacctgagaaggggagtgtctttgagggccttaaaaggaccatggcccaggaatgggggcgctggttgggcttggagctcaggctgctgtggatcccggcgcatcagttctgacttgccttacctgggtggacagcagtgaatctccacctgtcttctccagggagctcccatgttggggctgaagacgagcaggggcaacctgccagcatcacagaattcagtgtagtttatacatttcgattcctttcatctcagcaaaatgggcactgccagagccatttctgatcacaccaccatcctggaccatgtgactggaaggtgggtaaccaagttcaccagcaataaaacccagcgcccaggtagcctccagcagtgcggcttcctggcaacaaggtaggccctggtgcagggcaagccgcagcgaccatttcagataccgtccacagccaggaccgctgagaactgggacagtttcctgggatgagtgccagcctgagcctgcatggtgccgccgagcccggggtggaggagggagccaggcttcgcttcaaggcggcctctaccttttctcagaatggtttcctgattgtgtcaatgtgaaagttaaataaaatttatgtgccaaacctgacatgagctgcggttctgggaagggtgcctgtggccacgcgcgccccaggcaggtggggtaggcatgtgcgcacgcatgcatagctgctcagggtaagcagaccgcaggaggcccagccttcagccgccatggacacgcagggccgaggacgccacactgggttatttttctgtaacgtttagcaaagtcttgttacaatttcagaccaaatgagctgattgattacctctttgctgtttggaatctaactgtggatctgtatatgaatggaaggccttaaagctagtcttaattaaaatagtgttttccctcagaaacaaaattctggcccctggggtggtctcttcctcccctttggcatttgggtcattttcctaacatattttgccacacaagtggagattgctaccatagtatctcctggacatctcactgtgtccacagcaaggatgccgccaagcacggcagcccaccccgttcatttctgcacagccagtacccccactcccctgtcccctgacttccttctgaggctccagatccactaactccctcctcagcttacagcaggtggtgcacctccttctgccccctgaggcaccaccatgtggagggctctgctaccctgtctgggcgttcctcaggactgggctggatggtggcacagctcattcccaggcagtgacaccagggtgggggtggctggagtaggcaggcctagggggacctctgcactaacagcctgggtttgagagaaacaaacagcgaccctgcctccaagaagtgctagggcccggagggcagttcctaaattaggaagtttaataatacgaggttgacttaatgggtttgtgttttagaccgcttctctcctactggatttcactcctagcgcgtgtcaggtttattggtcttgtgttgagaaccactacagagaaatgcccagagctgagatgagatttgattttcacagtggctgactgggtgcacacgaaggtgtgcactcacggcctgcagggcacccaggtggcctctgccctgggttcctgaaaagaagagcctctgacacagcactggggggggtcctccctttcaccccccagctttctcgctctaaaccccggcatgctttgctcatctggaatctccagaagcagggaacagaaagggaaaaatcaagacagcagctaaatgtgaggcgaaggcagcctattggactaaactcaaattatgcagcatagtttcccaagctcctcggacatgccgagaccctcagcaggatagtgcagttacagggctgagcagaaccgcaggctcataggagatgagaggcctgggaagtgccaggacaaggctgcacctatccagcttgagtcaggaggcttcaggcaggtgaggtagccacacttggggagcattacagaagggttggccagaggagaggatgcccagggggatggaagctgcatccaaggtatggcgggtcggctgtgaaaaatgtgggcgcccagacaggaaggctgggcagcatcacatagggcttccaggggtgtgctcttcccctccgggaggaggggcaaacacaaggcaaccaacagctgtgatgattggggtgatagggggttgtccccaaagctgagggaggagcatgcaccagtacagactcacacccctacagcaagtagttggtgcctggaggggaagggcaggtagcttgatgtgaccaggaatggctgtgctctgcaagtttgggtgtcatttgggtaataggggctctggaggatttattttttctttttattatataaatttaaaaatatatgttggctgggtgcaatggctcactcctgaatcccagcactttgggaggccaaggcgggcagatcacctgaggttgggaattcaagaccatcctgaccaacatggaaaaaccctctctctactaaaaatacaaaattagctgggcttggtggcacatgcctgcaatcccagctacttaggagtctgagggaggagaattgcttgaacccgggaggcggaggttgcaataagccaagatctcgccattgcacttcagcctgggcaacaagagtgaaactcattctcaaaaatacatgtgtgtgtcaaagtgatcactgaactccaagtagctctcagcttcaaccgtttgtttttttgttatgtttgttttgtttttggagacggagtctcactctgtcgcccaggctggagtgcagtggtgcgatctcggctcaatacaacctctgccttctgggttcaaacaattctcgtgcctcacccccctgagtagctgggattacaggcatgtgccactatgcctggctaatttttatatttttagtagagacagggtttcgccatgttggtcaggctggtctagaactcctgagctcaggtgatccatctgcctcagcctcccaaagttctgggattgtagccatgagccaccacaccgggccccacagtttttgtataacaaattccctttctcatttcatctgccccttgccccactcacttaccgtgacttgtatggtgcacacacctgagaagctcagactggggatttgagtcccagtactttgacaccagagcccacagcattgactgccagctacattctactgactcaaatccattttttttaaccctgctgttctttggttcattgcccttcattcatctgaccaccccaccaaggcccccaacccagtgcctcccagcagcagctccccttggcttctcagcttgctctccccattcaccatggtgtctatttcaacattgtccatttttctcaaacttccactccattctcatttactgtgggcagatgaccttgtccccgacagagggaacaggtgccatcagatgagcattctccaacatactggctccacacctgcaaacttcctgtatccacacatcctctcccccttctactacagtgggcggggcttgcctcccaccttgctctgcacctccccacatctgttccgaattaccctcctgctctagtgccagctcctgtatctgcaccccttctccccactgggctctttcccggtggcattcaagcacgttcagggctctcgaatcctaagaccatcctgccttagctctttccccatcccacatggggccctgccttacctgtcacccccactccatcttgaatctagcagttttcagggcagtcagtcaattttccagattcttttcttctgtgcatcctttaatttctattgcttcccagtattcttagctcagttcttttctgtcaccactctctctgggcaaggaggcctccctgcagatcttcagttaccatctgtgtggaaataagccccatggggacccaagaacttttgtgtgttttgtccgctgtggtagcacaactctctaaaaacagtgcttggcacaaagttctcaagacttttcgaatgctgatttagacccaagtttgtgccttctgtctgcatgtctttttgagcttctgacacttataccacctgcctactaggtatttcctcctggttgccccacactcatttcaaacttattaattcctgagcagaaccttcatcttccccttcaaacctgttggtttatatgtggccatgatttcagggaacagtgacacaaaccatccaggtgtctgaaccagaaatctgagtcagaatcttggacaactccttcttattcactcctcacatccaatcagtcaccacttccagtagattcaactatttacaggtttcgggttcccggccacttctttccatcccttttgccacctctccagtatgggccactagacgtcccaggcgggccacacccacaaacacagatgcctgccctgctgctccccctgcctctgcctctgattttggccacctgcaatcatttctttcttttttttttttttttttctgagacagagttttggtcttgttgcccaggctggagtgcaatggcgcgatctcagctcactgcaacctccgcctcccaggttcaagtgattctcctgcctcagctgcctgagtagctgggattacaggcatgcgccaccacaccaccacacccggataattttgtgtttttagtagagatggggtttctccatgttggtcaggctggtcttgtactcccaacctcaggtgatccgcctgcctcggcctccgaaagtgctgggattacaggcatgaatcagcatgcctggccccacctgcaatcatttctataccccacagctagagtgggttttgtcaaataaaactctaattgtgttgctccttagctgaaactgttaaatggctccccattgctcttagaaaaaaagtccattttcttccacataaagtacaaggtctttaaggatttagactctggttcctctgcagtctcatctctcaccatctccttcactttcactccatgcccaacccataggctttggctgtagccatctattctcatctccatgagtttgccatggcctcttgtcatctccagaccttgtcacaggctgttccttgcaccccttctcttcaggtagctaactgctattcatcccttaatatccagctcagaaagcatttaggaactcttaagcccaagatgcccttccttgagatacaattcatcctggggcaaaattcctgtccatctgtgaacctatgaccagataagttacgtgcttccaaaatacaatggtgcaacaggcacagacatcctcatgccaaaagggagcaatcagaggaaagaaagggatgatgggtcccaagcagttccaaaacatagtaaagcaaatcacattagggtttatggcttaagattaatcttttttggtttgatgctctgccctccagacccactggagcagtggtctcaccttccagaaccactggggtggcaaagtcactcccatgacttggcctgttgccccacctcctatgttgcccatgctggtctcaaactcctgggctcaagcaaacctcccacctcagcctctcaaagtgctgggattacaggcatgagccaccgcgcctggcctctgctgtcgttagtgtcagctggcagtgtttctgttggtatcatcccatttctgttcctggccatctctgttgagatggctggttaggtccatgctccacacccacactaatctccttatcaaatggtaggtcagccatacccttgttctcttctgaacatgttttcttattttttgcaacatagactgagaatctcaaaatcttttggctctggttcctttttgcttaataattcagtcttcaagtcatttctctcttcttgcattttactacaaccaatcaggagaaaccaaactgcttcttcaacactacttagaaattgcttcagctaagtacttaatgtcatcacttgcaggttgtaccttccacaaaacactggaacgtcaacataagtcaggcaaatcctttgctgctgtataacaaagataacactttctgcattgtgcgatgtcattttcctcacttctgtctgcgacctcactagaatgacctttaccttccatatttctaccaacattctgttcataattatgtatatattctctaagaagatggatgctttctgtacagctctcctcttttctatttttttttttttttttttttttttgcaaaggagtcttactcagttgcccaggtggagtgcaatgacgcgagctcggctcactgcaacctctgcctcctgggttcaagcaattctccggcctcaacctcttgagtagctgggattacaggtgcccaccaccatgcctggctaatttttgtatttttagtagagacagggtttcaccatgttggccaggctggtctcgacctcctgacctcaggtgatccacctgcctcggcctcccaaagtgttgggattacaggcgtaagccaccatgcccagcctctcttttccatctgagtcctcatcagaatcacatttcatgtccatattgttagcatgcatctgaaacttctccattatctgtacatcatccgtttccaaagctgattccacattatttgttacagcagcacccacttcttggtagtaatttcttagtctacttggattgccgcaataaaatactatagactgagtggcttaaaggacagaaatttatttctcacagttctggaggctgagaagcccaagatcatggggttggcagattcagttcctggcaagggctctctttctggcttgcagtcagctaccttctcaccatgtcctcatgtggcagagaaagtgctctgatctccctcctcttataaggatactaatctgatcatgggttcctatcctcatgacctcatctaaacctaattacctctccatggccttaccttcaactaccattgcactgaggattagagtttcaacataggaattctggggcgcacaagcattcaggctataacactatgtgatcgtcagggcagggaatatttacatttgccatagcagcacccaagcctgaaaacaataggtgcttcatgaatgttgaattgacttgttatgttcatgcggatatggcattttctatctggacattcactgacctccttggctacccatatattgtataccttggcatggatgcagcaaccactgaatcttcctccccccttcccctgctgccaggattcaactagggaataagatattaactgaaactccttctaccctcaccctattccaaaaccctatcatgaacagctctcacccgcccttcctgtcccataatttgaggatggggatgaggaaaaataaaagatcattcccacagaaaagtggttgccaatttctaaatgtgtattttctttttctgggccatctcttgccttctcccttagaaaagtgccagatgtaaaacaacaataggaatttgcactttcattaatctcaaagtaacttaagtgtaagatatactttagagatctttgcacataatatcaaagctgtctatgaacattgagcagctcaactcatgtcaggccccactgctttggaaataaaagacatgggaatctcatctcgagccagccaagttggccgtgctccaccttaagacctggaggcccagtgagttcctccaggcccagaggttctaaaggaagaggtagctatgcctgcaagctaagccggaatggaatgggctgagcataaccagaaagaagaaagtatggccacctgtctccacactggtcctggtaataaaatttgtctacatgtagaggttagaaatggtgctttgtggctggatgagaatgcgctttaataagcattcattcaaggacttcatagaaaacccactgagaacccaggtgctaaggaaggaaaagagaattccttttaccttcctcctagatcccttatgcaagaaatagacttggagcatctggcttccaggccctttggttctacactaatacatttactccattttgtaaattcagaactagtacccatgaccctacacgaataagtgaatgggctctgggccttgcgtttttcagaaagtgaattgccctcaaaccctcagttttcaccaagatgttgataaggaatgacaggttaaagtatttgctcagtactcaagtttgaaagtaaaaactagcgtaggacagaatgtaccaagttaaccaccagggaagtggatcctgtcctgttatccaggaccaggttttattaaatgattcatagaatcagatccatttattccaagtagactggaaatactcgtgtcctgatcctttttgtatggttgaaaccacttcattagacatgttgcaatagtaaaaagcccgattagcttagtgtttactcattttatttctcagttatttaatattttgttttccttaatatccatgatgtttgtctctggtgttctgatgtaaaatcatagtgtgtattttttacactaatgttgaaatctgaaatatatgcacccatctttaattttgcgtgatgtgttttacgtgctattcctttctcagtgacagaaatgaacagaccagaatttgtgggatttgggtacaggatctccataagctgagaatgcccctcttgctgttgctgccagactttcggaggctctgtggctgagccccagactccttactgtttggacactgacgtgggctctggcctctgcattttccagaaccccagagagacctggaaagtcatcctcagcctccattcctggtcacagatgataatgtagaactggccttagctgtctttcctgggctctggctttctgccaccttggactttgctactttctgtaggacttagtagcacctgccatactctgccactccctcccctctaggctgagccctgtctcacagactctgaacaatacgaggcttttgctgcccaaagtttgtcatgattgatttaaactagcatgccaaaaataaattcctaaaagtcagtaagtcaacttaataactgtgaagttcagttatcaaaaacttatattatttttagggacaaaatcttaataacctggaaagatagatttttttaaaattagtttttgttcttcagcttaactgacacgtaatttacaaaacataaattttaccttttataagtatgcagttctatgttttagtaaatgtacttttgcgactattactacaatctagttttagaacacatttgttacccaaaaaatctcctaaatacccatttgaggtccagctttaggcccaggcaaccactcttcttcctcctgtttctgtttttgcctttattagaaatttcacataaatgaattaatatgatgtataaattcttgagtatggcttttttcccttagtatagtcttttagatccatccgtattgctgcatgtatcaatatttagttcatagactgggcgcggtggatcacacctgtaatcccagcactttgggaggccaaggtgggtggatcattgaggtcaggagttcaagaccagcctggccaacatgatgaaaccccgtctctactaaaaatacaaaaattagccaggcatggtggcaggcacctgtaatcccagctacttgggaggctgaggcaggataattgtctgaacccaggaggcagaggttgtggtaagccaacatcacaccactgcacttcagcctaggtaacagagtgagatcctgtctcaaaaaaaaaaaaaaaaagaaaaaaaaaaagaaattagttcatttttactgctgtgggaattccattatatggagataccaattttatctattcaccatttgatgaacatttgggttgtttcccaggtttggctcttatgaataatgctgctatgaacacttgcatacaagacttggtgtaggtatatgtttccacttccatgggatacctaggcatggaattgccggtaataaatatgtttttttctaatgaaaagaaaatcaatgttatggcttttccaaagggcaaaactaggctgaacttccatgttacagagagaataaaactaaagaattagccataggcaaattgcactgataaattatctgaaaactaaaaggttaattataaaaataacagcaacatattttctagtctacagttgatccttaaatattagtaattatggccgggtgtggtggttcacgcctgtaatcccagcactttgggaagccgaggcaggtggataacctgaggtcaggagttcgcgaccagcctggccaacatggcgaaaccccatcgctactaaaaataaaataacataaaaattagccgggcatggtggcatgtgcctgtaatctcagctacttgggaggctgaggcaggagaatcacttgaacccaggaggcggaggttgcagtgagcggagattgcaccactgcacaccagcctgggcgacagaacgagactccgtctcaaagaaaaaaatatatatgtacatattagacaattatgatcaaaagctgtagacttctagaccagagtctagaagggtgtggccatgcttgccctgggcagccccatgacagctgatgtggaaagcgggaagaggctgacaatccttctccccagcatgtctgcatgaagccttgtgattcactttcaccaagtacctgatgtttcacaattccagcattcccgttaatgttacctcccattgatcctaaaaagaggcaaatatgaagatgtatataattttggataaatcaaaggtggttcctgaggaggaaagtgtccagaacctctgatctgcatagtattttacacacttccaagcataagaagatgaacagaatggcagaagtgagagtacccattttacagtgaggggcatcaaagaacaggaagtgcaacaaatgagggaggttcttgggctaccattcaaagctatccacttggaagtttctctgccagtttcatttccccatgttcctccagggggcgctgtttcctattctagctcctgctaaagccaggttccctttctgtaaactcacttggggaaactcaccaaggtactctccgaagctacaatcatgacagttacaaaacaccgctgttcggagattaggcctaggacatacgtggtcagatttttctctgttgaagagcaggtagagaatgggaaaacaagtgtacagaaatcaccaaaaatctcagagctgcgggaacagaaattttgtctgttttattaaatcataagttcaaaaacaatgcaaagcttccctccctagaagataattcctagtaaaaggctgctaaaacccacagggttttgttggtggtggtggtggtggtgttagtgatttgtttgaaatctggaacgccttgctttggtctttgtatggtttcaccatgattttacccatcctggagcctgccccagcaatacttgggacaagtcacactaactatgtatgtcttcctctgaaaggaatggtgacctgtggtgggcccagagcagccgttccagttacaaaggggtatcttcacctgcagtgaagaaagcaactctcagccacaggggtgttagccgaccttggcctgaatagaggctcctcagggctttggagggagttttagaaaaagaggcctctcagtgcctggcagagttgtgctcatcagcttcaacaaaacccatctaactaaatgcagggagcatttgtgagcaatttttctattcaatgattgctcaaagttgcagattattctccagatgatgttcttgcttgataagaacccagcaaacagtaaaatcaagatattcagaaaaagctttatatgtgtgtgtacgtgtatatacataccatataactcaggttggtttcagtaagcctacagctatagcttccgttcttggcaaagatatataaagtgtattctttgcttttatgtaatgcagcagggtttttcttcctttaaaagccttctgctccacacattgactgctttcttgcttcccatgttatcgtgtacacacttcactgacaaccttcagcctgtatcacctgagatatgtttctcctgcacaaagacacagcatcctgctgattctgtctttgtggtattaatggcagatggctttaaaaatgcttgtgggggtcaggtgcagtggctcacacctgtaatcccagcactttgggatgcagaggtgggatgctgaggtggatcacttgaggtcaggagttcaagaccagcttggccagcatggcgaaaccctgtctctactaaaaatactaaaaattagctggacatggtggcaggcacctgtaatcccagctacttgggaggctgaggcaggagaatcgcttgagcccaggaggcggaggttgcaatgagccaagatcgcaccactgcactccagcctgggtgacaattacttgtgggaatctgcatgtgaacgtacctggctgggaacaccctggcagatacagtcatttaatgccaggaataaagggcaggaaggtgtatagtgagagaatctgagaaatgggcaccaggtgtggaaagagctgtaatgtgaagtagaaatgggtaggcttgctttatgtctttaatttctttcttttttttttcttttttgagacagagtctcgctctgtctcccaggctggagtgcagtggcgcaatcctgcctcactgcaacctccgcctcccgggttcaagcaattctcctgcctcagcctacctggtagctaggactgcaggcgcacaccaccatgcccagctaatttttgtatttttagtagagacagggtttcaccatgttggacagggtggtctccatctcttgaccttgtgatccacccacctcggcctcccaaagtgtgggactacagacatgaaccaccatgcccagcctatgtctaatttctttttagcctgcttcctgctttttttttttttttgccacatgattctggagaatgccaaccgatatctacgagatctgtgaaactgagttatacatataagaactactttgtgaagaagatttaccaggacacatgcaaaggatttggtgcgagaaatttccattgtaatgctgtacatgctcaggttcagggacttctaagagggaaaaaaaggccacagagctgttgtccaatcaatagcctcattaccactcaaccaataactccattaacactaatgatggcttgtttccactcctggcaacaaggtctgtacttgtagaatgactaatggccacttcatacagaaatccacgccatctcctgttcaatgtgcatctgtgtcccaggcaggtgggatgttgttcatagtttatttttatacgctttgaatcatgtaaatctgggcctgatggtgaaaacttgtctgccaagggccagtatgtaacgacagtgatcgtgatgttaattgtggtggcccgtgttcatagcaccatcccacagggactcctcatccatcatttggctttaatgttcagccagtcctgctcatttgggaatcagcatgtcttcttgatgtaatggtaggtaagtttgattgtgaaaatgaggaacgggcgtgctcagtgcttgccgaggggctggcaccgagtctactaggtagaacaggggtttctacacctaaaacatgtcattgcggttcttttgctgtcttggcatatgattaattacttcacctttgtgtgttccttagtacttttcagtagacacaataatgccagctaccatcctgggatataatgctataaaaactaactatagttccttgaatgtttgtgtttaggaggtgatacaggctaaaaatgtgcttaagatcaagaagatcttagatgctatagtaaataataaagtatagaatttaatgatgagagtagaatattttggttttacacagcactttgaggttgataaatggacactaccaggctctctttcagaaggatacactgcatagagcatcatccctgtcatcatcaccatcaaataacacccctttgtagggcttaataatatatgatctgcaaagagctaataatctagtgataggaactctctggcccttaagaatgtacattctaaaatcaactaatcatttagtatatcctcttggtaaatgagaaaaatgtaaatttaagcaaacataattgtggagaagttggacctcttgtaggaagtcatttcaggatgctcttctcatttagttgagaatctcgatgtgttgggtgagcaaagagctgatttcactgaggacgccaagagcactgaatgtgccacataagagagggagaaacagaaagaggtaggctttaagggggtaaggtgaaaccagttgacaactgtgctgccagataagcagtaataatattacttttatttctattgtttaagtaacattggtataagtacctattttaccaatttaagaaagttagttcactatttcagtgttagaacaacatgtagtttataactaaaagcaccttgaaattagtatagatataaagattagatcaaaggggctggctgagcacacccacctacctctccttccctttgctttcattatttctttgcaactttcttcttgcccacctacccaggcaacaagtcctcctccttcccctaaaacactggggacaggagacagcaaacaagaacagcagctaccaacaagcgaacagggaatctcagacctaataatgagtgatgcgcaatcaagaaacatcagacacttgggggcaaagcagcacagtgaagcagaaagaacattccctagcaatagcagaagaatgtctttctgtgaaatttagatttgcaaaatctgaacaccttggaattgttgcaggtgaacatcatgccgtggccagggtagatgggccccgaacagaaataacacttctcaacaagcatgttgaacccgtatgggtccccactgaccaaaggccaaacttgagaggaagtgaccgaatacctttctagtaaagcaaattaatagcaatgctgttagtgccaggaaaagaaaaagggtcatcaattgaaggcaaattttaggtaatccctgcgaaacagaaaacagacagaatatgattaatgaagacaatgatagcctcaaacccagaaagggctgtggcagcaaaagagtggccactactctgggaatgttccaagttcggggacattggacacagggagcagcagggaacctgggaaacctgaaaagcgattgggtcgagaacgacattcagagttcccagttaggtctggccctttgccaagcttgtgccaagtaggtaacagcagaggtgtttgccctcagctcaaagtaatgagtggatgtgccccagggctggagattccacatagctcaaggggaacagggaggctgggcgcggtggctcacgcctctaatcccagcactttgggaggccaaggtgggtggatcatttgaggtcaggagcttgagaccagtctgaccaacatggtgaaactccacccctactaaaaatacaaaaattagctgaatgtggtggcacatgcctgtactcccagctacttgcgaggctgaggcaggagactcacttgaacccgggaggcggaggttgcagtgagccaagattgcaccactgcactctagcctggggaacagagcgagattctgtctcaaaaaaaaaagaaaagaaaagaaaaaaagaggaacagggagcctcggactcaggagatgagctgctacacaccttcctcccaaagagacatgcctcctccttcccctcaaacactggaggcagggcactgcaaagagacagcagttaatgacatgggagcagggaacctcaaacctcacaaccaaggagcatgagacacttgaggggaaacagcaccataaacaggggcagcaaggcccacaaggaacctacaggaggaaggaacctacaggaggaagcatcataaacagagcagacagaataggacaattacaagaagtatcactaaccatagttttcaaccaattttttaaattaatttatttattttttattatactttaagttctagggtacatgtgcacaacatgcaggtttgttacatatgtatacatgtgccatgttggtgtgctgcacccattaactcatcatttatattaggtatatctcctaatgctatccctccccctcctcccaccccacaacaggccccggtgtgtgatgttccccaccctgtgtccaagtgttctcattgattttgaaccagtttttgaaaaccagaaagatgaaattctcttgtccttcttttgtctcatttgagcacaggattatactgggctcctaatgagctggagctggttagcatcacctgcctgtccccccaccccttttttttctgtgccctggaacagtttgcataagctatgagttatttgttccttggaggttttagaaaatacaccccaaaccaccatatgggccttgaacctttggcagacagaatacctcttcaaatgttatttcatttttttctatggttgttggtttgcataagctttctactccactttggaccaactttggaacttttataatcctgtgagttgcctatgtcatctaagcttgcaaattcaatgaagtaaagaaatattaatttctaattttaaaaaactcttttgtatctgtagttaagcctcctttcattgcttctgtttttcattactgtcttctttctggtttttgtcttaattatacttctaaatatttgtctatgatgttggtcttctcaaatgttggtcttatgatgttggtcttttgaattatttttatttttttgagacggagtctcacttcgtcactcagcctggaatgctgtagcataatttcggctcactgcaacctccacctcccgggttcaagcaattcccctgcttcagcctcctgagtagctgggactacaggtgcccgccaccatgcccggctaatttttgtatttttagtagagacagggtttcatcatgttggccaggctggtcttgaactcctgacctcatgtgatctgcccgccttggcctcccaaagtgttgggattacaggcattagccaccgcgcccagcgctttcgacttttattagtcaaatctactgttttattttattttctattattaatttttgttcattcctttatgattactttagtccactttctttaagtttattttcttgctttttttttctttttttttccctgagagaaattttaaaatttttaaaattttcttcaaggctctaatttttctctcagcacagtctttgagttgtaggtctttttgctgtctagtcctaaagaattttgactttgacattctttttagatgtatttttaaaaatacctttaacataaatatgtatagttgctagaaattcgtattttgtttgcttgttaagtccttttaatgattaccatatcactaaactgtggtagtgaattcagactgtagacaaaatttttaattttttgttgagcgttccttcgtggattagggaaatgtcaaattgtttgaaaagtgcttttgtgaaaataattttataatatctctattacagagatatatttcatatatcatacaatttatcaatttaaatggttttgagtataattggtatgtgcacctgtctacctagtcaattttagaacatttctatcaagccaaaaagaagcaccatactctttcactattatcctctgtttcttccccaccttttccctcaccgagaaatgactaatttactttctgtctctatagatttgcttattctggacattttatataaataagatcatataacgtgatattttatgtctggcttttatgactaagtgtaagtgttcaaagtgttcatccatgttgtagcatgtagcaatcaacatcaaatagaagtggtaagatacgacattccttccttgttcctgattttagggagacagcatccagtctttcaccataaagtatgatgttaattacgaactttttgtagatgccctttgtcagatggaggaagttccatagctagtttgtttagtgctttttatcataagatgctgtcagattttatcacatgatttctctgcatcaattgagataatcaatggttttctcctttcttctactaatttggcatattaatttaatggatgttccagtgtttaaaaaaacactgtgtgcctgcgaaaattcccccttggtgatgatatataatcctttttatacaactctggattcagtttttcaatattttgttgaggatttttatgtctatattcataagaaatagtggtctatcaatttctcatgatgtctttggttttggtatcacggaagcaattgcctcatagaatgagttgggaagtgttttccctttttctaaatgttttggaagagtttgttaataattggaattaattcttctttaaatgtttggttaaattcactagtgaatccatctggtcctgtggttatctttgtagagagttctttattactaattcaacctcttttctattggtctgttcagattgtctatttgttatcagtttttgtagtttatgagtttataatgaatttgtccatttcatctaaattatccatttattgacacacaaattatatttctttataatcttttctatttctgtgatgtccttttttatttctgagtctagtattttttgtcttccttcttttttttcttggcaattctagttaaagctttgacaactttgttcatactaacttcattccagtgagatataaaaatgtcactgctatagctctattcacttcctcactttctggggcattatttttatacataaactaatgttaaacatgtaacactacattttaataattattatttttataattttatgtattttaaaggagctgttatgggttgaattatgttcccccaaaagatatgtactaagcctcagaacctcagaatatgaccttatttggaaatgggcttattgtaaacatagttagttaagatgagataattttggagtagggtaggcccttaacccaatatgagtcgtgtctttacaagaagaggagtgagaaagacataaaaaggagaatgccatgtgaagacacagagacacacaaggagaagaaaagcacagggaaggcagactggagtgatgcatctacctggtaaggaatgtcaaagattgctgaacaccagaagctaagagagaagcatggaacagattgtcccccagaaacctgcaggaggactcaaccttgctaccaccttgatttcagacttgtagcctccagagctgtgagaggattagcttacattgtttcaagccacttagttttgtgataatttgttgtggcaaccccagaaaactaatacagaagttaaggaaggaaagaaaaaaagtaagtatatatgtgtagcttttgttatttcagtcttcttatttattatgtctggctctctttatttgcctggatttgagttgctagctggagtcattttctcagccaaatacactttttctctcatccacttgtgctgttattggcatatatttctatatattatagacccctcataacacatcatatacatatacacacatgtatataatttctaacttatgtatataatttatatcatatatacacacatatatagttttatacaattactttgtaaaacagttaagggaataaaagagaagaaatatgcatttatactgtatgttataattacatgattatgtttcctggtggtctgtgctttatcatggggattgaagttactgtctgggataatttgttttcagcctgaagaatttctttagtgttttctgtaaggcagctctgccaataacaaatactctccttttttgcttatctatgagatatttgcctgcattttcaaaaaaaaaaagctctatttgcctgcatttttgaaaaatagctttgctgaatatagggttttttgttgacagttttttttttttttttttttttgcttactttgagcactttgactatattatcctaatgccttctggctctcattgtttgtactgaagtcagtggataatcttataagagtttccttgtgagtttccttgaaggttcccactcagaagctggacgtcctgcttgagatattcttgaaagaatatctcaaatggaaaacttaatattttacagtgcttaaattgttatctatagagcagttaaggggaacgataatcttataacaggatctgcatgattcttggacagtgattgtttttttttttttctggctgctttcaagatgttctcactgtctttggctttcagcatttttatggtgatgtatctatttgtgaatatctttgcatttatcctatttgaggtccatcgagcttcctagttgtgtagattaatgatttttcatcaaatttgggga

SEQ ID NO: 6 - DNA, 45770 bp, Homo sapiens
  allele (1)..(45770): CHST10 Variant Allele (rs1370627)
tgaggcggtgccggcgttctggcccccaaagccggtctagcgcgccgggcgtcttccttacttccgctgccgccgccgccacatcccgggacccgacgggccgcggcgcggaggcctcggggcaaggtggggcgggcctcccgagctcccaggaccccgcgcgcttcgcccacaggcccggcgaagcccgacccgcgcggcgcccccagggccaggggaggagcctaaggacccggacgagcgccgctccagtagggtgagctcggggacgcgcaggcgggtgggtttcagcgcctgggcccctctccccgccgcggggcgcacggaaaaaccggggaacccgcgggttttgtcctggcgagccacatcccggtgtgttttggcgacttgaagacctccctagttcgcgggagtagcgggaagagccttcctcgcgttaattatgcaataagaaggcgtccttgtgcgggatgctgtgacccgcggaattattgatattgtgcgagcctacaatttacttctttcatccttggctgagaatttgcgtttgtaattgtagatggagagaggaagaaagggttcagcttgggtccaaggagcatgcagaggaaggcagggaagaaggagcatgtgcagcttcggtgcgaggggagtcaggggtgggaatgcacgttccctgcctgaggggccccggggtgccctgagcctctgatcttcgctgtcaggaggcctgtccgaagttggaggttgaggcatgcagttctgcacttctggctgggaaggtgaaccaggttttccaaaatgtcatttttgctttccaagtctgcaaggcaggaaagggttgggcagtgaatggaaagtagtgcagccaggttctggttagctcagcggcaggactgtcataacggtgggtttttgttgttgttgttgttgttgttgttttgtctgaaaaccagagtctggggctttgggccatgaggagttgggttattgcattgcttagagtgccagagtgagaaatgtctcagacgctgttaaaattaggcagctcagtttagctctggctctctgataaccaaccacctcctccttcactcttttcagtgactgggttaaaatgaaaagacacaaagagagaagtggtcttttcccttccctccccattataattaagagcttagtccatcttggctcagaattggaattcagaattcagaattgctcttgaccctgaagaatagaatctcaaagaaatacctgagcagaaaattctcttcttcgctgaaatgaaaattggagtgtttgcaaaactgaacaaagaaaggaaagaatttgtaaacatcacaggcaacttgcagttatattcggatcatttttcagtgtttgaggagttcatacaataaaaaggtgagagagagccaggaatagaaacaggggagagaggtggttgcaggaccttagagattgcagaaacccaggagttcattttcttttcatacacttctggataacctggatgtgaggaccatcaaatgccgtacatgatgtttctaacaatgatggaccacatatacaacagtggtcccataagactatactaccttatttttactctaccttttctaattttagatacacaaatacttaccattgtattacagatgcttacagtattcagtacagtaacagcagtacaagttagtagcccgggagcaatagatgattccatatagcctaggtgtgtggtcagctgtaccatatagcctaggtgtgtggttagctgtactatctaggtttatgtaagaacgctctgatgtttgcagaagaacatcgcctaacgatacatttctcagaaggtatccctattgttaagtgatgaatgactgtatataaagcttaatctttcaatcaacataataggaaattgcttttaattttagcattgagttcttagagtaaagggaggcagagagagaccgtgctgcatgtgtcccagtcagcttgggctttattgtatgttaaatgagttgtatgtttattttggtagatctcctaaatccatgatctaattccatgactttggcttgtttctggttttttatgatatggcatttggctaaaattttccaggtgctaaaggtgtaaggagtacgaaaatccagagaacattttgcattggaagaattgatcatcttgtataggaatcctataactatttcaaacatacgaaacaggcataattggatttgattatttttgctacaaaaaatgtttcatttttcacactaagttacatggaagagtcttttaaacagctagtggttttggtacatttagaatattcatttaccaagaaatccaaatataacctgcctttgtaagagacccattctgccaaatatatttgaatcatcaaaatggttcactatttccttcctaagtataaaccaagttgtattaagtaagttgatcttgtaacttttaataatgcttttttttttttaattttcctatccagtgacaagaggaaccaagaacctcagttcaggggaaacacagcaaggaaatgtgagccccaggctgcagaaggtacgtgaaggagaatgtgagctcatcagttatttgagcatgccattcagtattgttcctgccttttttcttgcctgtgcagattgtaaactcttgattaggagtatgtaaatgtgtgcttagaaacgtttccttaaatataataataggagcatgctctgaggctgggattatgtgagttagtacctgctgagacctgtgcttggtacagagtgaaccccatacaggtgtttactgtatattattattattgttcatgaaaacctgtcttaactacaggtgtatttctcactggacagttaagagtgttttcattctcctaactaagggtggttaatcgttccaaggcggtaaattgtaaggatgacaacagagaagacaaaggaaatttctgtacgcagattgagagaaacctttactatgaatttgaaagtctcagtgacatgcaatagaactttatagtataaattcatatgccacactttgcattatggagttgtaatttaatgattctattgatagggtaatgcattgtagttcagaatgtgctcagggttgatggtgaaatgtccccgtttctgcagccctggtctgtctagttctcatctcacctgtcatcctcctggggttaccagttccttgtacattaccaggtttttgtgtgtgtgtgtgtgtgtgaagtttcctttagagtctggctgtgttttaaaagttgagccctggacatgtgatccctggtatgtgtatgaggtgaggttgtcagtaaagggccattgacaggcctcctcatctgacccacccctgtccctgcttgcccactctgcatgaggaacactggccttcttgccacttttggaattctgggacccagaccacagtctttgcccaggggtctgcatggcttgctcccacaatctgtcctgccttttctcaacatcctgcccatgcccttgtttattagccactgcacctgtcacctggcttgatcatatacattgatcacttgatttgtttatggcccgtctatgtctgttagtaggaagcactgtgagagcagggaatgtgtgttgctatatccccagggcctagaacagccccggctcagaggagggctttggtaaatattgctgaatgaaaaaatgtctggaaaaagcctggttaagcagagttaagtgggcttatttaccatgggacttttcagaaactttagtaagtgaatgcgcatattaaaagtggggcctggcaggtgggaggcaaactcatcagcagagtaagaaaggcgctgtgcttctggatgacaactcagacatggggaaaagctgctggcgggaatggtattggcagctgagcaaaatgaatttacaagtttccttttcaaaatgcaggggaggaaggatttgcatcaagagatggtaatagtaacatttccattgttagttattacaaacatgtacaatgtgtgctatttatcttttatttaaggtggggaagggggaagattagggcttcttgtagattcttccttccctgaccctgctttccccataaggccttaagttcttcagctgccagttcatccttgtgggttgaactgaggaaccaaaccctctggcttggtttcagatcctgacatcttgacttgtgaaaatcccatttaatgactggaagtaggaaagctctgaagatggatatgcagattctaggggtcaggaggctctgttcagggcctgcgccatgaccgaagggagggcgtgtaggggctcaggttctgctcccaccattagctctagaggcactctgagagttgtcttggctccttgaacaaaggggagttaattacagaaaatgccaggctttttaaaggccatttgtcccctagctgtagggagagcagcagcccttggcagagccctgaggaaagactctttatgtcaggccgcagtcctcttgtagacagaaataatgagccttggtggtgtcatcctcagataggaggcaaaccccatggtgaaattctgtattcaaggaaacaatgcagagaatggggcggacttagaggagctggggtgaagtgaatttggaatgcctctcttttaaaaaaaaatggggcagagttttgtgttgttttccaaagtcagacaaagcctgattctacagagtctagttaaccgtagatgggagggctgtaaaggagagtaagatgaaggcagtgatggaaggtcttagattctaattaaacctcttttagctgtgtatttggaacacttgtaattcagagcatcaatagactctcgttgactagatgcttttttgctgccaattttccttcttaagatggaaggaggtggtgggagaatggcgtttatgccagaatgcctagagtctgcattttaacaagatccccagggggattcatgtaggcattaaaatttaagaaggggtgaggtcctggaccagcaattctcagtcccagctgctcattagagtcacgaacagagctcttaaaaaatgcctgggtactgcctccagagatttgtgttgtcttggctggggtattcttggggcccggggtatcactgtatttcttggaagtttcccaggtaccgccccagacataaagccagacaccttcaggtagatgtctagattcagaaggcacataatcccgaagcaaatgacaccatgcttagctgggcacaccactctttaggattcatcaaaacccaccacaccagataatgtggatcctcgtagctcatccgctggcttctagagccacagccagagatgatgggatgtggagcacccaaccggggttgcttgtgccgggttagaattctccctcctccatgaatgaaaatgaccttgagactgggcagtggctgagtgggcatttgctttttgtacctctgactctgctgctgaagaaactgtttcaaaatttaaatcagatcatgacatcaccacccctcttttcatgtaaaactctcttcaggggctcccattgcttgcaaagaaaagaccataatagccctggcaggccccatgttgtctggcctgcatctgcctcagcctgtgccccagaactccagccacatgggcctgcgtttagttactcaggggcccattcccttggcctggaaccctgcccttcaccttaggtaactgtgctgtcccagaccactctgcccaaggcacatcccattgtattttctccccacagcaccatgtccctctcacaccatcaagtaccactcctcagatagcttctttccttcgtgtgggcctgttagacgacaagctctgtaaggacaagaactgtgtgtgtttagttagggactcagggtcatatccttggcagctgttttactgcatgaatgaatacactggatactggataatgaataatgagcttgaagtcattatttttaggttattttgtccttaaacttgtatgcacatacacacctactcatgtttgagtgctgtattttgtaaactgtagagatattggacctgagggaagtgggtattttgagagagtactgggctgtagtcttactggttctgattggctcatgtaggatgtgacttgtagaacaagtcccagttttctaaatttttaactaggccgggtgtggtggctcacgcctataatcccagcactttgagagtccaaggcaggtggatcacttgaggtcaggagttcaagaccagcctggccaacatggtgaaaccccatctctactaaaaatataaaaattttccaggtgtggcgtgcctgtaatcacagccactcaggaggctgaggcaggagaatcgcttgaacccaggaggtgcaggatgcagtgagccaagattgcaccactgcactccagccggggtgacagagagacacactgcctcaaaaaaaaaaaaaaaaaagaaaaaatgcttattacaaatatttaaaatatgaattgtataaagtacaaaaagagctcttactgtcctctcatgattttattctatgtattacatatatgtgtctatgtttgtatatgtgtgtaatcatatatatttcacacatacatgatttttttaacaaatgggatcatacattccatcctgcaacttgtcttttttgtttactggtatatcttgacactttggatatggatctatgtcattggcttgcctttcatcatagagttttatttgaaatgaaaatgtttttggacttcggcatgatttcctaaaccccccaatcaatgtgttttaagtagtaagtgtatttgaatgcatatacatgctgtggcttagatcattttgttttcaaataatactgaagtcctcatagcatttggttgttttctagtctcagttaatggatattaaacatagaactgctctgtggagactagagaaatattttgaggttgaaagggggcctcattcttgaaaaagcctggagaccctcagggagagggttgggcaggctgcctcctgaagtacctttccacattcctgagttctagtaagttgctcaattgacacagtcattcagcaaatagcaattgttggctcatggtgcgccaggcactgtgctggtccctgctgtcctgaccagcatgagcccatattctgcaaggagagcaaatggcacatagcgagagcatctggactgtgctgggtgtagtggaggaagtggagcaaggtcaggtggcgcagagcggtgctgggggtgccacctgggtggtgatgaggcagagctgactcttcctctgctgcccatgggaaagggagcaggccctgcttaccccgagtgtacaagaagcccagtggccgggagcagctcctcagagagctccctcctggaccccgcagtgactgcccacaggctctgtggcctgcaaggggctctacagccagatatgggcatgctggcaggcagctgtgcttgaaatgctgataggggcctggggtgtaatgctcttctcaagagagtggttttggcagggctagggttttgcccctgaagctttgcaaatccacatcccccactggagtctccacgtgtcctggtaccatcccggggacaagaagcagggaaaaagcaggggaaggaggtgggaaccctgcagtccacccttctcctatcctaatggagtggccagggaagggactctctgtatatcttagtttagtaagagtttgcagaagtcaagttaaaaatggattttttgaaaatgaaatacccatgtgaaagaacacattggatgatacatggtcagttgcatgattgttgagaaggtcttctgactgatgagtgtgcaggtagctgtttgttcctgtggatgaaaaatgggagcccgaagagctcttcattgacacacccacagccacctagctagggagagggtgagtgtagaccagtccctgacctcctgcccgggtgaaagactagctacggagacggtgagtgcagaccagtccctgaccccagcccaggtgaaagactagctagggagagggtgagtgtagaccagcccctgaccccccgcccagctgaaagaagctaagagctcctgacttttaaatgaaaatccaatacttaggaaggcacatatggcttcaggagagtgcacctctcagttttcaactcatgtagttggagaaatcctatccctaggccacctggcttcctggagaacagaagaggtgctattcattttcaggtaaggcttcattatcttcccactttacctgcagatgagctcagtgggcgaaatcatattacattccttcagaagactagttccattggaaagatttgattcttaaactataaaaacctccaaagtgctgtcctgaggccgggcgagggtgatcaggggttggaagcctggagggaatgagcagagcaggcagtggaatatgcagttcccaggtcctcccgccacatgctctgcagagtcagcgcgtcacctgcaggagggaggcagtgcctcttatcgttgttccctttttcatagcactgatcctaggagagggtgggttgcaagccccaggacactcagagccaggacctgtctgtttagaattgcatgcaacctgcgtggtacatcctgttccttttactccctccccaacccaccctggtgcctctgctgcttggttagaaatggcctgcagctggcatttttcaggggggtgctctcactgtgacccatgaggatggacccccctgagtgcactgtcttagagggctgagctcagtggacttggtactgctgggccctgcatcctctggccacagtctaagcctcagtttcttgaagggaagttagcagttgctggaataagagtgtgtcttgtttttttctctcttcttggtgtagaccctactgtcgcattaatttctggcaaccacactgagaaaggtgtagattaagctggaaaatcacgaagagtgccaagggattggtcagtttttactgggggtctgcaccaggccaggtgggtgctggttttttgtctacattgtctcatttaatcctcatggccactctgaggtagtggtaggaggagggccttctattagagatgggacattgaggcttagagaggttaagtgacttatggagtcacagagctaatgggtgtgagcagggatttgaaccaagtctggggttctttgtgcctcactatctctgacatggagtggcggaaggaggaggggattgtgggatggagacaggagacaggacagctggcttgcaaggaatttggcatgcccctgctgggtggtgttgctgataaactacagtacactcggttaaatgtgaagttcagaaaacaacacataggtttttgtttttgtttttttttagtataagtatatgtaatatttgggacatactttatactaaaaaaattaactgaaattaaatctaactgggtatcctgtgtttttatttgttcaacccgacttggggaacctgggaaggacactgggcctcatatctgggcacaaaaaatactggttttgggggggagtataagtatgtcttatgcaatatttgggttatacttacactaaaattttatgttatctgaaattcaatcttaacttgggggatgtcctgtatttttatttgtctaatcaggcaaccctattggtgaccccaggaaacacacgaagccttatacacgggcacctgagggtggtttgcgagccatccggagaaaacccaggcagcttggcaggtggtgagctccccactgcaggctgtattcaggtgtggccggataactacgtggtgggtgtgtcatggatcctatttgcattccagatgcctggttcctgtgagattctaggatgtaaatgttgagacaaggagagtgattcacctgggtcttcatggagctctgacccacccagggttaggaggctctctctgaaattatttgccatcagcactgtgttgaggggaccacttctccctgccatgcagaagtgatggatggcctcagtcagtcggtggaagccagctcagcccagggtcttgtctgtacgtggagagctttggcttgaagaagcactgtgttaaaggtgaaatgaaacacactttcttgtgtcacctgccaagaactgacagtgacttcccagttctttatgtgcctcctgcaggagagtgtggcttctgtgccaggctgaggaccgacatgccccgtgttgctccctggctgtgacagcatgaaaaacacccacctcagtgttctacccaggccgctgctggcaagtgggcggaggcgagaagcgtcagtgttcattcctttgcttttttagagcttctctaggtgtggctacatcttgtcagccagtcagaattttaaacacagccagctcctaattgccccagcatggcttctgcccactatgaatgaccctcagctaaggcctagtccttggcaggcctcttcctgccacctgcttccagaccatcgtgggagctcactgggaccttagcctgggcccaacaggagtcagggatcaaatgtgcaaaggagtcttattctgtgttctgagaacacaaggaagtggtcttctctcattatcatgtctctccattagggtgttctaaatttgattttattattgaatcaatcatttatattattaattcaatatgaaatgttaaatgccaagtcaaactacctattgtagcagtggaaaaaaacggaaatatttgtgctgatacttactgactgaaatcacctgtcgttttcattcctctttgttgacttgatgtatttgtaagcagcaggggcatctcgcttgtgttttccaggaagagtcagtgaatggctgcggtgtgacaacatgcaccaccagtggcttctgctggccgcatgcttttgggtgattttcatgttcatggtggctagcaagttcatcacgttgacctttaaagacccagatggtacgtatgcttcatggtggaacgaattttggctaatttagacctagctgcaacactgttcctaggtacatgcatagatgacttctgtcacagagtcaaaggactttcatgccagcagggaccttggaggtcatggcctccgttccttcatgttacagaggtgtgaggggaggtagggtgggaggggctggagggtcttttcaagcatctcctctggaggaaggaagctgctctttgtggctgaggcctgggtggtgcctaggagcaaggagcagggtctcctcccagcagcacagtggccttatgccttgcagcagggcgcctctcaggctcgcagttgggaattctctttgcctcatgtcatcatgagaggtgcagcctcaactgcttggcatgcccgtgtggtggccacatgtttgaaggtcaccctccatgcagcggaggagggtcatttaaatgtatgtcttcaggttgtcttggaggctttcttagctctcctttactgaacgtaggcattcagatgaggacggataaagagcgccaaattgggtctcagaatgctgattctacttcgtgctcttgtcatttgcttatctacatcacaatgtttcttccaccaaatggacaccctgcctgctccggcaccgcccatgattgccctgagcatggtgaggtgctctgtggtctgtggagtgctggatatgtccaaagaggtgtgtgatatgctctccagccccgaggccacttcattgagtggccaagcaggcaagcacgaggaagccagacacatggagtcattgaagtcctcatttgtgccgtggattggcccattcctttaggctgattgggagatactggggaacgtggatgagcacagcactttgctgtgctctgcaccgtactttgtcctcctgccgatggtggccttggaaaggggcagttagagatgcctctgtgccagcagttcttcctggaggctgcactgacctgtgctgtctgtgtgggacaggcccctgctccacctcacagagctcccaggcatgtccctggctgtgtcaaggactgcccgatgtcctacacctcctgccccatcctctctctgccccaccttgtctgcagagggacagcaaggttagaagggaggtctgcagggaaaagagggacaccctgaaattagcccacatggtggttctccccatgacagttgttgggccctgattggctgtcatcacatgtcctgcctcatcctccaggagccctggagagaaacctgtgaggtctgcacagcctcgggaggtgatattacacctgcaggtatctgggcaggtgtcactgagcatgacagctcacgcccgggactcggggttccgtcagcagagcaagggtcgattcttggagggttgctggaatgtgacacgatgatctcagtttgacagtttggacatttccatggcagcttcagcacagtgccatgccactgagagatccctcctgaagccctagagccgggttctcatccccgcagcacttcagaatcacctgtgggactttacagacctgctgctgcttgagacccagtgaaggagaatcactaggggtggggcccagttgagaagcacagtggtagatcctagctggagaactgaagagaaacagagctgctgagaataagaaataggtgttactcaggattctcctaaatgtcacctcctggtatggaaggcactcaaaaggcaggtcatgaggttaaattgtttatggtttattttgcttaaaaaagtaggagtagatgtaatacattttagtgagacttctataggtaatagttaaataagacttgtgcctttgtgttttactgttatctggcagaatggcctctaaagaatgccttgtttcccagcggcatctggtaaatgaggtctcattctcctttgatgtatcaagttttgtgctgaatgttttcagtgtagacactgatcctggaagctaagcaggggtaggcccggttagaaaaaaagcaagtgtaggcgcagaacagggttttgtgaagcggagaaaaggagtggtaaggagtgttaggagataaaacctatgaagaaagatgaagggctttcggattttacacctggagaggagcaccgcagcggtccttaatactgcctgtgagatctttccagccggctgccttcaggcgagtgaaagggggcactttccctgccctgtgagatctggtgtggtgtgtgggtgctgggtcactgagatgggagtgctgcccctgaccccgaggcaggggctgctggtggtgaggatgctgttggccgcacagtgtgcagtgaactcagtgagaatcttctgttgtgggcccactcccgttgcggggtgaccaccacagcactacccagcctgcctcactcgcgtgagatgttacctaattgtcccaagggacctggttaggttaggatcctgaaggtggatatccgccagctgagttctggatgcaggatgcgagctggcacccagcatcttgccagtgcacaaggacgctgggctgaagcatcaagagcatttacactcagagcctgcccctgcaggcgtcagagaggccctgggctggggtggtgtaggcctctcccctggagcctgcccttccagcactgtgctttagagagtgtgtcccggagcctggatcttgggcagcacaggaacccctctaagctcgtggccataaagggcttctcacatgttggagtttatttcacacacgttcacggtgtttttgattatgaaccagaagcccattgtgaagtgtcaagaccaggaaataacagacacggcagtgtccacggtggggagttccatttcctggaaagtgcgtggagaagccttggcctcagtgctcccgggctgctcctttcagctctgtcctctgggacagggccagcctcagaacccccatcagtggtgtgcatgttcttctcacctacctgcctttcccggtttctcctgccactggagcccctaggaagagcatggttgtcgtgagttgctgtttaaagcaacacttactttttttagtgttacagtttctgttcagctcagcagtggagccagtgatatttgtggcaatgatttatcctcagttagcaaatttcagtatcatattgaactaggatcaggtgttgtaactagactttctcataagaaaataaatccccctcagcgaagggaatgtgatggaatcatatggcaagactcaaaatgatgcccttgtggacctggtttgtgtttgtaggcgctggtttttcctctcctggttgacttcctcattggttctgagccgcttgagggcagagcctgtgatgtgaaggtctctgcagccttgaccatctttgcatgtacttatttgccatctgcggatactctccagtgaaatgtctgggtgtatcgtacctattttctaattagattggttggttttttaattgttgagtttgaggattctttatatattttagataggagtccttggtcagataagtggttcataaatattttttccctatctggagcttgtcttttcctcctcttcaaatgggctttcacagtgtagattttctctttggttgttttttaaaaagattgatggttttatgtttcacattcaggtctgtgatccactttgagttcattgttgaataaggggtgaggtttggatcaaggtttgttccgtgtgtgaatgtccaggtgccccagcaccatttgttggacagactgccctcctccgctgaatggcttttatggctttgtcaaaaggcatttgggcatctttgagagcttctatttctggggcctctgttctgtcccatccacctgtgtgccttttccttttagagaagacattcaacctctctgtcttccagtgtacagtgccaaacaggagtttctgttcctgacaaccatgccggaagtgaggaagttgccagaagagaagcacattcctgaggaactgaaggtgggcacagccaggccgtggtccttgtcctcttgaacacggcacccttgtcgcggggagctggccttcccctgtggctggttccgcttgtcatcacgtctgcgttagagccttttcctgtgttacttctccatgttagttcaccttgttaatttccatttgggagaggcacaggtcacgtctatttttgtgcccctcacagagctctgtgcatcagggctgctctgtcactgttggttgtgcagcattcctgaccagctgaacatgagccttgcctggggagccgagagtattgggcagggtcaggaggaaaccagaagtgggagaagacatctcacccagtcatggggttttagagtgaaagggggccctggacagcagaacaactaattcagcctccaaattgtatggatgagagaactgagcctagaaaaaaggtggatcctccacagtcccatggagttcctggcggagcccaaggctgctgacttccacccagcccttgctggcttgacattctggctccatggctctctgcaggcttcttgtgcacctaaattcctgatcattccctagctgggatgaggggtgcactctggaaggcctctcacttcgtaacccccattctggatctagagggttgaagttgcaattgttccagaaggaatgaaatgggtacagcgagccctaaaaatatttttagcccagaatcaagccgtagaggttgggacagctcctatccatgggtcacagtgtaaggatgataaattagaactcaataaacatagaaaacatacaccagtcagtagagtgctgctggaggttacttctcgtaggacattgatggaatggaggccaagtttacagaactctgagacagcctaaatgttgcttttaggttgaggcatcccagggtaagaaaataatttggatggggtacagaaacgaaaccaaaaaatcttatgggaaataggagagtggctttaataggatggatttaataggaaatcaaagttacatggataaaaacaaaggtagggtaagcctttggcaaagtgtcgcaacaaggttccctcaaggatgccataccctgtgaggaagagggtggtcatcttggtgctccctctccgggtggagggtgctcccggagagattgccagcctgcaggagtcattgcaaataaaaagactgcgcctgaatgtgctttacagtttgcagtgtactttactgggtttcaatctcattggtcttccgagccgccctctgaggtatatttttattctgtttgcatttgggaaacatgaggctcaaggaactgtgctcactgggtcagtatcccctggacagcaagttgtgggcctgggctttgaactcagtgtcctctgtgcccctctcttacccgctgccccagtcattctcatgagactcagatgggaggtgagggaagtgggggatgtcagaggtgatgtccgctgaggccacatgccgttaggtgacaccaaaactcagcatgtgtcttctcacaagaaaggggatttatcaacatgatcagattctgtagctcacctttaaaagtttattttggccaggtgcggtgcctcactcctgttatcccagcactttgggaggccgaggcgggcagatcacctgaggtcaggagttcaagaccagcctggctaacatggtgaaaccccatttctactaaaaaatacaaaaaaatagccaggtgtggtggcatgtgcctgtaatcccagctactcgggaggctgaggcaggagaatctcttgaacccaggaagcggaggttgcagtgagctgagatcgtgccattgcactccagcttgggcaacaagagcgaaactcggtctcagaaaaaaagtttactttgtgcatggtgtagccgaatgtttgaatggaaaatagaaaataatatttgtctttaagttggctttgtatatttccaaagggaaaaaagaaaacaatgctcattcttacacacaattgaacaagaaatcttttttctttagctgggcatggtggcttacgcctataatcccagcactttgggaggctaaggcaggagaatcgattgcgcctaggagtttgagaccagcctgggcaatatactgagacctcatctctacacaaaatacaaaaatcaggtggttatggtggtgtgtgtttataaccccagctacttgggaggctgaggtgggagaatcacttgagcccaggagttggaggctatagtgagtcatgattgtgccactgcactccagcctgggtgacagaacaagacctcgtctcttagaagaagaatttttgtctctaatgctttgctaaaagaaaagcaatatctaatatcttttctttgttcaaagaaaagcagtatctaaaagtgcagagttttctgcattttctaaagggaacttgttgggaggtgctctctcctgatgcgctgttcttgagtgccatccatgatcagggttaggtttggaacagagagggaggagaagacagagaggctcttttgggataagtgagcaagaggtgggatggatgaggaaatgaggttaaacgagacccgttcttgtaagagcaaggagagtgcctggcgtggctcctggttttccatggtgggtggagggcccgggcagccgctgatgccctgtggggaggaacggaggccactctgcaaaggggcctctcgcttccccagtgtcttcatctcgaaaagcaggcagtcagtagcccccaggatgctcttcccaccaccagggaatcccaggaaattcacttaaacacacaagggagaaagcatcctggccagaggtcatgagtgtaagagagtttggttacagtagatccataaaggaagagctgggtggggggccctgaggggggacctctgtcatcctgatagttccagcgtcccggttctagtgtgttctagaagtcttatgtccttcccattttctaactgacgttgtcccctgggaggacaggttgttaaaactaccctataaatggatttcctggcaagcccagtgcattttaaaagatataacaaggatatttgggtccattcaatacaattatttggaaggatcatctgctttgaaattttgggaagttctgtgtagctttaagagatagatatggccgggcgtggtggcttacgcctgtaatcccagcactttgggaggccgaggtggcggatcacaaggtcaggagatcaagaccatcctggctaacacagtgaaaccccgtctctactaaaaatacaacaaaaaattagccaggcatggtggtgggcacctatagtcccagctactcgagaggctgaggcaggagaatggcgggaacccgggaggcggagcttgcagtgagctgagatcgtgccactgcactccagcctgggccacagaacgagactccgtctcataaaaaaaaaaaaaaaaagagagagagagagatgtagcagctgaagccttaaaaatgctgagaaacagggccacaactagagggggccgatggggttggtggaggctgccctgctattcaggaatgccctcaggatgcctccagagaacaaggaggtgtgagcagcaaggggactttaactcaccgaggacagggggcctctgagcaacttctgtgtgtactggcacatctccctgtgccccctccaacccatgcacacacaaggcctctcacattacaggtattctcttaggttctaaaacagccctgaaaagaatggaccagcatgtagaatttgagctttttcatctttttccccctagctagaggattccaaacttcttactttggtttttaatttcttttttcccccaagacggagtcttgcttgctctgtcgcccaggctggagtgcagtagtgcgatcttaggctcactgcaacctccacctcctgggttcaggtgattctcctgcctgagcctcctaagtagctgggattacaggtgtgcaccaccacacccagctaatttttgtatttttagtagagatggggttttactatcttggccaggctgatctcgaactcctgaccttgggatctgcccaccttggcctcccaaagtgctgggattacagacatgagccactgtgcccggccttattttgttttttaaagtcaaacttctctccaaagatctgaggaaccaagcttgcattcattttccttgcccagcctgccgatcgggctggtggagaggctctgaaggcctcatgaaggggctggggatagtgggtgtcactctgtagacagacaaggaagggaagaagagaaggctccagatggaaaggaggggatagaccagcaggagcggctctgcttggcccggtcctgcctcctttaatggtccctgggcctcttctgctctgtgtcacctgcagccaactgggaaggagcttccagacagccagctcgttcagcccctggtctacatggagcgcctggaactcatcagaaacgtctgcagggatgatgccctgaagaatctctcgcacactcctgtctccaagtttgtcctggaccgaatatttgtctgtgacaagcacaagattcttttctgccagactcccaaagtgggcaacacccagtggaagaaagtgctgattgttctaaatggtgtgtgtgggtctactgaatgtccactgggaagggtcttggtggccggtgctgaggaggctggggaggacagcaaggaggagtcacaagagggctggtttgacctgaagggactggtggccgtccagacaggcctgtttttgttgtttcctgttagtgttgtgccttacaagttagtggggctcgtttagacaccgattcttttcaaaggggcacagccacagtccagctctcctcacctgtcacagcagatcctcactttaggtggctcgcccacccccaggcccccctcctttgtctcttcaggttccctgtgctgatggttatagtcacccactctgtccgacatccccagggccccacactcgcagagccaccaggaagcctcacggtcaccctctctgcagtgagaagggctcacactgtagagcctgggaggggagccctggcccggggcctggagcctctttacctgcagaccaagcgttctgtgccagcgagcaggaagaaattgtaccccatttcacactaagcatctgtgttcagaggattgagtcagcttgcttcaggaaacctgatgtttgctagggaacaaattagatcatcacaaagtaacctcatacactgcagttttgattactcactactctttttagagatgtctatttatttaaattccaattagtctgaaccgatcctaataattatgggctctgcttatgaaatttagcttcagacaggagttagttccagtcaacagcagtgggactcctgggtcagaaatcggattttggggcaccatgggtaggtggccctaaggctccatgtcctgcttgccactcctgatgctgcccacagagtcggtggtcactcctggccactgtttggccttcgcaggggttggctgggagagagaatggtggcacctcatcatctggttgtcacatataattaatgtgcttctgcagtgattggatagcatgttgggttttcagaagcagaatgaggctgcaaatcgaattgaaaacaaggaatatacaaaggctcacaaatcagccaccacagtgtgaagcagcatactttaagaagtaaacacccacttagaagggcagcatagaaatcagagtgggcttgctggatcatgtaatacagaagcgggtggtccttgtggctatcttcggtaaccactagtgcacctggatggggacaggtgcatgaatgggcccatatgtggacccacagagctggttctgtcattgtccccttgagagcagtgctccccacgcctagtttacagccatccatagcatgtaccgcagagttctggactgggctttaaacactcgggggaggaatcaataaaacagacaagactgtgtccactggtcagatggcccagggagattcttccctgccaggactccaatcttaaccctaccggattaacacaaagatggatattaaggcttacagaaacttggagaaaacctcagcatactgacagtgtatttccatttgtctgtattgagaaaagagtgaaaaacctgctcagccaccaaccctaggatggtctctgcccaagttccattcagcagcctggacctgcactggtccctgatgacagaccctggctgttggcacggccctgccttctcgacataccttgtcctcttttgactcctgtctcaaatgtatcacagctcccatagcttagtcagatttttccagcatcaaaaggtctttgctctttgccagcctgggatgctgctggggtacctgagagccactgtgggccaggggcatgtggtgcttggagagcttagcctgtctatgggatggggctgtgaagctgctgcgggcatctgttagcatgacgttccaaagtcctgcttctctggcattttcccccagtctcagagtagagtaagtgttgctggtgttaggagttctgtttgcatgcagcgatcttcctctaatggcagatttagcccagttaggtccattgccaggggtaggcactgccagcatttccactcctgctccctccccctcctccctgaaatcatcagtttcctctagttggcttatggattcccagaagcttttcttcactcgttcatcctgctggcagaagcagttgaaattcaaagacctaaacttggatattgggggtgggcttgtcatgcacacgtggggaacatgaggcccaaggtaaagatgaggtaaggacatgcccttctctaaggggcgtactggagcagccaacctgccttcctttccgtttacttcccaggagcattttcttccattgaggagatccccgaaaacgtggtgcacgaccacgagaagaacggccttcctcggctctcttccttcagtgatgcagaaattcagaagcggtgagaacagcttcctcaaaggggaggggggagtttttgtaaacctgagaagaaatttggggaaaaccccaggctgagttctgtacttggcagattgatcggaggaccacagagggctgtcggtttgcatcagtgagaggcagctaagctacaccccccattcggcgcctcaaaactctcagttccttctgagaatttccagccttaccttcacacagtccattaacatgaaggtgacatcattttgttaatagaaattagcaggcaactttgttctgctttggtaaagttttatagattgcttgctgaatatgatcttttctttataagaaagggatttggattgcagagatctcactgagtatttgattctcccagaggcattgtgcccactgctgtgggagctgcccctgcagtggttgtgtgggctgcatccagcatgggcagggtagagagacggaacccctgatcgcagcaaggacggagtccaggctgggcgcagtggctcatgcctgtaataccagcactttgggaggccgaggtgggcggatcatttgaagtcaggagttcaagacaagtgtgactgacagaaaccccgtttctactaaaaaaaaaaaaatagcccgctgtggtggcacacacgtgtagtcctagctactcaggaggctgaagcaggagaatcgcttgaaccctggaggcaagggttgcagtgagccaagatctggccaccgtactctagctggggcgacagagcaagactctgtctcaaaaaaaaaaaaaaagaagatggagtccttagctaatagatgagaaagttctcatgtagtagctctcaggtggcccaggagagcaaggctgaaaaggagtgaggatgcaaaagcagcggctcacgtcaggtcaccagctggattttgcctcctgggtctgcagccacctgccttgcatggcgcctgacctgcatggcacctgcccatccttacaacccttaccagagatgctcctggtgaggagtgtcctgctgttgccctgagcactcatggggcttttgtgagactcagtgagtgaagacacggcaaagcacagagagcagtttctggcctgtcgtaatcacaccgtgttctgtgatgtcactgttgtcatcgtctttgtcatcgtcactgctgccggccctcctccccagggccatgctctgctgccgcccgcttgcagctcacccagacctgctcctgccctctggagcgtgaagcctgactctctgttttctcttgccccccttcccctggcaatttgaattgaacttttaaaaatatgcccttaaagtaactttccctggcaccatctattcctgactcagagttcctgcccttatgattttctgcccaggaacaaaatttgtaaacattcttgaagttttgaatcattcaagtaaaacagaaggtagattaaatagatgtcttcacagtgactgcctacaatgagtactgtggccttggacaggtaaggttttccaagcctctgttttctcacctgcaaagtgtggtaataacaggattaatccacaggatcttggagtagattaagagacgtgtggaatgcattcatggcagcctcggcacgtgagggtcccatacacagtgctgcactccgctcattcttccctctcccgccccctcagctgtgacctcctgtggcatcaagttaacctcttgttcgtttttttccttagattgaaaacatacttcaagttttttattgtaagagatcccttcgaaagacttatttctgcatttaaggataaatttgttcacaatccccggtttgagccttggtacaggcatgagattgctcctggcatcatcagaaaatacaggaggaaccggacagagacccgggggatccagtttgaagatttcgtgcgctacctcggcgatccgaaccacagatggctagaccttcagtttggggaccacatcattcactgggtgacgtatgtagagctctgtgctccctgtgagataatgtacagtgtgattggacaccacgagaccctggaggacgatgccccatacatcttaaaagaggctggcattgaccacctggtgtcatacccgactatccctccgggcattaccgtgtataacagaaccaaggtggagcactatttcctgggcatcagcaaacgagacatccgacgcctgtatgcccgtttcgaaggggactttaagctctttgggtaccagaaaccagactttttgctaaactaatgcataagacctatgaattcaaatatctttattagacctggggctaaccaggtgaagatctgagcccagaaatgacccttcctccaccacacccctcctttgaggacgcccggggtctcccacaggcctgtgagttgcctcggcatatgacgcagaaccccaactgttacaacttagtttggatgtaagatgctctgaggaccctgcccacacccctgcgtgcattaggatgtcgctggcctttgctcacctcagaggggagaaaaggctaaagatttgcagtttgacagcccagcagggaggaagcatcacacagcgttaagagccgtttccttcaggtgttaaggaaggggatgcccctgaggttctcctggctagtcagggtggcttcacccatcactggtgggttgcaggaacagcacccaggactctgaggagggacagagaagcaagggggctgctgaaatcgcagagacttttgcagcatcagatctgaggagtaaaacggcacctctggccttcatcttggtgctgcgacaattgtggaggcaaagcattctttctgtgactattttgttcctgtagacagtcagcgatggccagagggtggtgtggtgtccaggggtccatctttccagaatccatgcctgtgtaatgctggtccatgcttctgaacctgtgtctgccaagcgcctatttcattcagcacaagacatacgattttagaaggtgaggggaggggaggctttttctacctgagaaggggagtgtctttgagggccttaaaaggaccatggcccaggaatgggggcgctggttgggcttggagctcaggctgctgtggatcccggcgcatcagttctgacttgccttacctgggtggacagcagtgaatctccacctgtcttctccagggagctcccatgttggggctgaagacgagcaggggcaacctgccagcatcacagaattcagtgtagtttatacatttcgattcctttcatctcagcaaaatgggcactgccagagccatttctgatcacaccaccatcctggaccatgtgactggaaggtgggtaaccaagttcaccagcaataaaacccagcgcccaggtagcctccagcagtgcggcttcctggcaacaaggtaggccctggtgcagggcaagccgcagcgaccatttcagataccgtccacagccaggaccgctgagaactgggacagtttcctgggatgagtgccagcctgagcctgcatggtgccgccgagcccggggtggaggagggagccaggcttcgcttcaaggcggcctctaccttttctcagaatggtttcctgattgtgtcaatgtgaaagttaaataaaatttatgtgccaaacctgacatgagctgcggttctgggaagggtgcctgtggccacgcgcgccccaggcaggtggggtaggcatgtgcgcacgcatgcatagctgctcagggtaagcagaccgcaggaggcccagccttcagccgccatggacacgcagggccgaggacgccacactgggttatttttctgtaacgtttagcaaagtcttgttacaatttcagaccaaatgagctgattgattacctctttgctgtttggaatctaactgtggatctgtatatgaatggaaggccttaaagctagtcttaattaaaatagtgttttccctcagaaacaaaattctggcccctggggtggtctcttcctcccctttggcatttgggtcattttcctaacatattttgccacacaagtggagattgctaccatagtatctcctggacatctcactgtgtccacagcaaggatgccgccaagcacggcagcccaccccgttcatttctgcacagccagtacccccactcccctgtcccctgacttccttctgaggctccagatccactaactccctcctcagcttacagcaggtggtgcacctccttctgccccctgaggcaccaccatgtggagggctctgctaccctgtctgggcgttcctcaggactgggctggatggtggcacagctcattcccaggcagtgacaccagggtgggggtggctggagtaggcaggcctagggggacctctgcactaacagcctgggtttgagagaaacaaacagcgaccctgcctccaagaagtgctagggcccggagggcagttcctaaattaggaagtttaataatacgaggttgacttaatgggtttgtgttttagaccgcttctctcctactggatttcactcctagcgcgtgtcaggtttattggtcttgtgttgagaaccactacagagaaatgcccagagctgagatgagatttgattttcacagtggctgactgggtgcacacgaaggtgtgcactcacggcctgcagggcacccaggtggcctctgccctgggttcctgaaaagaagagcctctgacacagcactggggggggtcctccctttcaccccccagctttctcgctctaaaccccggcatgctttgctcatctggaatctccagaagcagggaacagaaagggaaaaatcaagacagcagctaaatgtgaggcgaaggcagcctattggactaaactcaaattatgcagcatagtttcccaagctcctcggacatgccgagaccctcagcaggatagtgcagttacagggctgagcagaaccgcaggctcataggagatgagaggcctgggaagtgccaggacaaggctgcacctatccagcttgagtcaggaggcttcaggcaggtgaggtagccacacttggggagcattacagaagggttggccagaggagaggatgcccagggggatggaagctgcatccaaggtatggcgggtcggctgtgaaaaatgtgggcgcccagacaggaaggctgggcagcatcacatagggcttccaggggtgtgctcttcccctccgggaggaggggcaaacacaaggcaaccaacagctgtgatgattggggtgatagggggttgtccccaaagctgagggaggagcatgcaccagtacagactcacacccctacagcaagtagttggtgcctggaggggaagggcaggtagcttgatgtgaccaggaatggctgtgctctgcaagtttgggtgtcatttgggtaataggggctctggaggatttattttttctttttattatataaatttaaaaatatatgttggctgggtgcaatggctcactcctgaatcccagcactttgggaggccaaggcgggcagatcacctgaggttgggaattcaagaccatcctgaccaacatggaaaaaccctctctctactaaaaatacaaaattagctgggcttggtggcacatgcctgcaatcccagctacttaggagtctgagggaggagaattgcttgaacccgggaggcggaggttgcaataagccaagatctcgccattgcacttcagcctgggcaacaagagtgaaactcattctcaaaaatacatgtgtgtgtcaaagtgatcactgaactccaagtagctctcagcttcaaccgtttgtttttttgttatgtttgttttgtttttggagacggagtctcactctgtcgcccaggctggagtgcagtggtgcgatctcggctcaatacaacctctgccttctgggttcaaacaattctcgtgcctcacccccctgagtagctgggattacaggcatgtgccactatgcctggctaatttttatatttttagtagagacagggtttcgccatgttggtcaggctggtctagaactcctgagctcaggtgatccatctgcctcagcctcccaaagttctgggattgtagccatgagccaccacaccgggccccacagtttttgtataacaaattccctttctcatttcatctgccccttgccccactcacttaccgtgacttgtatggtgcacacacctgagaagctcagactggggatttgagtcccagtactttgacaccagagcccacagcattgactgccagctacattctactgactcaaatccattttttttaaccctgctgttctttggttcattgcccttcattcatctgaccaccccaccaaggcccccaacccagtgcctcccagcagcagctccccttggcttctcagcttgctctccccattcaccatggtgtctatttcaacattgtccatttttctcaaacttccactccattctcatttactgtgggcagatgaccttgtccccgacagagggaacaggtgccatcagatgagcattctccaacatactggctccacacctgcaaacttcctgtatccacacatcctctcccccttctactacagtgggcggggcttgcctcccaccttgctctgcacctccccacatctgttccgaattaccctcctgctctagtgccagctcctgtatctgcaccccttctccccactgggctctttcccggtggcattcaagcacgttcagggctctcgaatcctaagaccatcctgccttagctctttccccatcccacatggggccctgccttacctgtcacccccactccatcttgaatctagcagttttcagggcagtcagtcaattttccagattcttttcttctgtgcatcctttaatttctattgcttcccagtattcttagctcagttcttttctgtcaccactctctctgggcaaggaggcctccctgcagatcttcagttaccatctgtgtggaaataagccccatggggacccaagaacttttgtgtgttttgtccgctgtggtagcacaactctctaaaaacagtgcttggcacaaagttctcaagacttttcgaatgctgatttagacccaagtttgtgccttctgtctgcatgtctttttgagcttctgacacttataccacctgcctactaggtatttcctcctggttgccccacactcatttcaaacttattaattcctgagcagaaccttcatcttccccttcaaacctgttggtttatatgtggccatgatttcagggaacagtgacacaaaccatccaggtgtctgaaccagaaatctgagtcagaatcttggacaactccttcttattcactcctcacatccaatcagtcaccacttccagtagattcaactatttacaggtttcgggttcccggccacttctttccatcccttttgccacctctccagtatgggccactagacgtcccaggcgggccacacccacaaacacagatgcctgccctgctgctccccctgcctctgcctctgattttggccacctgcaatcatttctttcttttttttttttttttttctgagacagagttttggtcttgttgcccaggctggagtgcaatggcgcgatctcagctcactgcaacctccgcctcccaggttcaagtgattctcctgcctcagctgcctgagtagctgggattacaggcatgcgccaccacaccaccacacccggataattttgtgtttttagtagagatggggtttctccatgttggtcaggctggtcttgtactcccaacctcaggtgatccgcctgcctcggcctccgaaagtgctgggattacaggcatgaatcagcatgcctggccccacctgcaatcatttctataccccacagctagagtgggttttgtcaaataaaactctaattgtgttgctccttagctgaaactgttaaatggctccccattgctcttagaaaaaaagtccattttcttccacataaagtacaaggtctttaaggatttagactctggttcctctgcagtctcatctctcaccatctccttcactttcactccatgcccaacccataggctttggctgtagccatctattctcatctccatgagtttgccatggcctcttgtcatctccagaccttgtcacaggctgttccttgcaccccttctcttcaggtagctaactgctattcatcccttaatatccagctcagaaagcatttaggaactcttaagcccaagatgcccttccttgagatacaattcatcctggggcaaaattcctgtccatctgtgaacctatgaccagataagttacgtgcttccaaaatacaatggtgcaacaggcacagacatcctcatgccaaaagggagcaatcagaggaaagaaagggatgatgggtcccaagcagttccaaaacatagtaaagcaaatcacattagggtttatggcttaagattaatcttttttggtttgatgctctgccctccagacccactggagcagtggtctcaccttccagaaccactggggtggcaaagtcactcccatgacttggcctgttgccccacctcctatgttgcccatgctggtctcaaactcctgggctcaagcaaacctcccacctcagcctctcaaagtgctgggattacaggcatgagccaccgcgcctggcctctgctgtcgttagtgtcagctggcagtgtttctgttggtatcatcccatttctgttcctggccatctctgttgagatggctggttaggtccatgctccacacccacactaatctccttatcaaatggtaggtcagccatacccttgttctcttctgaacatgttttcttattttttgcaacatagactgagaatctcaaaatcttttggctctggttcctttttgcttaataattcagtcttcaagtcatttctctcttcttgcattttactacaaccaatcaggagaaaccaaactgcttcttcaacactacttagaaattgcttcagctaagtacttaatgtcatcacttgcaggttgtaccttccacaaaacactggaacgtcaacataagtcaggcaaatcctttgctgctgtataacaaagataacactttctgcattgtgcgatgtcattttcctcacttctgtctgcgacctcactagaatgacctttaccttccatatttctaccaacattctgttcataattatgtatatattctctaagaagatggatgctttctgtacagctctcctcttttctatttttttttttttttttttttttttgcaaaggagtcttactcagttgcccaggtggagtgcaatgacgcgagctcggctcactgcaacctctgcctcctgggttcaagcaattctccggcctcaacctcttgagtagctgggattacaggtgcccaccaccatgcctggctaatttttgtatttttagtagagacagggtttcaccatgttggccaggctggtctcgacctcctgacctcaggtgatccacctgcctcggcctcccaaagtgttgggattacaggcgtaagccaccatgcccagcctctcttttccatctgagtcctcatcagaatcacatttcatgtccatattgttagcatgcatctgaaacttctccattatctgtacatcatccgtttccaaagctgattccacattatttgttacagcagcacccacttcttggtagtaatttcttagtctacttggattgccgcaataaaatactatagactgagtggcttaaaggacagaaatttatttctcacagttctggaggctgagaagcccaagatcatggggttggcagattcagttcctggcaagggctctctttctggcttgcagtcagctaccttctcaccatgtcctcatgtggcagagaaagtgctctgatctccctcctcttataaggatactaatctgatcatgggttcctatcctcatgacctcatctaaacctaattacctctccatggccttaccttcaactaccattgcactgaggattagagtttcaacataggaattctggggcgcacaagcattcaggctataacactatgtgatcgtcagggcagggaatatttacatttgccatagcagcacccaagcctgaaaacaataggtgcttcatgaatgttgaattgacttgttatgttcatgcggatatggcattttctatctggacattcactgacctccttggctacccatatattgtataccttggcatggatgcagcaaccactgaatcttcctccccccttcccctgctgccaggattcaactagggaataagatattaactgaaactccttctaccctcaccctattccaaaaccctatcatgaacagctctcacccgcccttcctgtcccataatttgaggatggggatgaggaaaaataaaagatcattcccacagaaaagtggttgccaatttctaaatgtgtattttctttttctgggccatctcttgccttctcccttagaaaagtgccagatgtaaaacaacaataggaatttgcactttcattaatctcaaagtaacttaagtgtaagatatactttagagatctttgcacataatatcaaagctgtctatgaacattgagcagctcaactcatgtcaggccccactgctttggaaataaaagacatgggaatctcatctcgagccagccaagttggccgtgctccaccttaagacctggaggcccagtgagttcctccaggcccagaggttctaaaggaagaggtagctatgcctgcaagctaagccggaatggaatgggctgagcataaccagaaagaagaaagtatggccacctgtctccacactggtcctggtaataaaatttgtctacatgtagaggttagaaatggtgctttgtggctggatgagaatgcgctttaataagcattcattcaaggacttcatagaaaacccactgagaacccaggtgctaaggaaggaaaagagaattccttttaccttcctcctagatcccttatgcaagaaatagacttggagcatctggcttccaggccctttggttctacactaatacatttactccattttgtaaattcagaactagtacccatgaccctacacgaataagtgaatgggctctgggccttgcgtttttcagaaagtgaattgccctcaaaccctcagttttcaccaagatgttgataaggaatgacaggttaaagtatttgctcagtactcaagtttgaaagtaaaaactagcgtaggacagaatgtaccaagttaaccaccagggaagtggatcctgtcctgttatccaggaccaggttttattaaatgattcatagaatcagatccatttattccaagtagactggaaatactcgtgtcctgatcctttttgtatggttgaaaccacttcattagacatgttgcaatagtaaaaagcccgattagcttagtgtttactcattttatttctcagttatttaatattttgttttccttaatatccatgatgtttgtctctggtgttctgatgtaaaatcatagtgtgtattttttacactaatgttgaaatctgaaatatatgcacccatctttaattttgcgtgatgtgttttacgtgctattcctttctcagtgacagaaatgaacagaccagaatttgtgggatttgggtacaggatctccataagctgagaatgcccctcttgctgttgctgccagactttcggaggctctgtggctgagccccagactccttactgtttggacactgacgtgggctctggcctctgcattttccagaaccccagagagacctggaaagtcatcctcagcctccattcctggtcacagatgataatgtagaactggccttagctgtctttcctgggctctggctttctgccaccttggactttgctactttctgtaggacttagtagcacctgccatactctgccactccctcccctctaggctgagccctgtctcacagactctgaacaatacgaggcttttgctgcccaaagtttgtcatgattgatttaaactagcatgccaaaaataaattcctaaaagtcagtaagtcaacttaataactgtgaagttcagttatcaaaaacttatattatttttagggacaaaatcttaataacctggaaagatagatttttttaaaattagtttttgttcttcagcttaactgacacgtaatttacaaaacataaattttaccttttataagtatgcagttctatgttttagtaaatgtacttttgcgactattactacaatctagttttagaacacatttgttacccaaaaaatctcctaaatacccatttgaggtccagctttaggcccaggcaaccactcttcttcctcctgtttctgtttttgcctttattagaaatttcacataaatgaattaatatgatgtataaattcttgagtatggcttttttcccttagtatagtcttttagatccatccgtattgctgcatgtatcaatatttagttcatagactgggcgcggtggatcacacctgtaatcccagcactttgggaggccaaggtgggtggatcattgaggtcaggagttcaagaccagcctggccaacatgatgaaaccccgtctctactaaaaatacaaaaattagccaggcatggtggcaggcacctgtaatcccagctacttgggaggctgaggcaggataattgtctgaacccaggaggcagaggttgtggtaagccaacatcacaccactgcacttcagcctaggtaacagagtgagatcctgtctcaaaaaaaaaaaaaaaaagaaaaaaaaaaagaaattagttcatttttactgctgtgggaattccattatatggagataccaattttatctattcaccatttgatgaacatttgggttgtttcccaggtttggctcttatgaataatgctgctatgaacacttgcatacaagacttggtgtaggtatatgtttccacttccatgggatacctaggcatggaattgccggtaataaatatgtttttttctaatgaaaagaaaatcaatgttatggcttttccaaagggcaaaactaggctgaacttccatgttacagagagaataaaactaaagaattagccataggcaaattgcactgataaattatctgaaaactaaaaggttaattataaaaataacagcaacatattttctagtctacagttgatccttaaatattagtaattatggccgggtgtggtggttcacgcctgtaatcccagcactttgggaagccgaggcaggtggataacctgaggtcaggagttcgcgaccagcctggccaacatggcgaaaccccatcgctactaaaaataaaataacataaaaattagccgggcatggtggcatgtgcctgtaatctcagctacttgggaggctgaggcaggagaatcacttgaacccaggaggcggaggttgcagtgagcggagattgcaccactgcacaccagcctgggcgacagaacgagactccgtctcaaagaaaaaaatatatatgtacatattagacaattatgatcaaaagctgtagacttctagaccagagtctagaagggtgtggccatgcttgccctgggcagccccatgacagctgatgtggaaagcgggaagaggctgacaatccttctccccagcatgtctgcatgaagccttgtgattcactttcaccaagtacctgatgtttcacaattccagcattcccgttaatgttacctcccattgatcctaaaaagaggcaaatatgaagatgtatataattttggataaatcaaaggtggttcctgaggaggaaagtgtccagaacctctgatctgcatagtattttacacacttccaagcataagaagatgaacagaatggcagaagtgagagtacccattttacagtgaggggcatcaaagaacaggaagtgcaacaaatgagggaggttcttgggctaccattcaaagctatccacttggaagtttctctgccagtttcatttccccatgttcctccagggggcgctgtttcctattctagctcctgctaaagccaggttccctttctgtaaactcacttggggaaactcaccaaggtactctccgaagctacaatcatgacagttacaaaacaccgctgttcggagattaggcctaggacatacgtggtcagatttttctctgttgaagagcaggtagagaatgggaaaacaagtgtacagaaatcaccaaaaatctcagagctgcgggaacagaaattttgtctgttttattaaatcataagttcaaaaacaatgcaaagcttccctccctagaagataattcctagtaaaaggctgctaaaacccacagggttttgttggtggtggtggtggtggtgttagtgatttgtttgaaatctggaacgccttgctttggtctttgtatggtttcaccatgattttacccatcctggagcctgccccagcaatacttgggacaagtcacactaactatgtatgtcttcctctgaaaggaatggtgacctgtggtgggcccagagcagccgttccagttacaaaggggtatcttcacctgcagtgaagaaagcaactctcagccacaggggtgttagccgaccttggcctgaatagaggctcctcagggctttggagggagttttagaaaaagaggcctctcagtgcctggcagagttgtgctcatcagcttcaacaaaacccatctaactaaatgcagggagcatttgtgagcaatttttctattcaatgattgctcaaagttgcagattattctccagatgatgttcttgcttgataagaacccagcaaacagtaaaatcaagatattcagaaaaagctttatatgtgtgtgtacgtgtatatacataccatataactcaggttggtttcagtaagcctacagctatagcttccgttcttggcaaagatatataaagtgtattctttgcttttatgtaatgcagcagggtttttcttcctttaaaagccttctgctccacacattgactgctttcttgcttcccatgttatcgtgtacacacttcactgacaaccttcagcctgtatcacctgagatatgtttctcctgcacaaagacacagcatcctgctgattctgtctttgtggtattaatggcagatggctttaaaaatgcttgtgggggtcaggtgcagtggctcacacctgtaatcccagcactttgggatgcagaggtgggatgctgaggtggatcacttgaggtcaggagttcaagaccagcttggccagcatggcgaaaccctgtctctactaaaaatactaaaaattagctggacatggtggcaggcacctgtaatcccagctacttgggaggctgaggcaggagaatcgcttgagcccaggaggcggaggttgcaatgagccaagatcgcaccactgcactccagcctgggtgacaattacttgtgggaatctgcatgtgaacgtacctggctgggaacaccctggcagatacagtcatttaatgccaggaataaagggcaggaaggtgtatagtgagagaatctgagaaatgggcaccaggtgtggaaagagctgtaatgtgaagtagaaatgggtaggcttgctttatgtctttaatttctttcttttttttttcttttttgagacagagtctcgctctgtctcccaggctggagtgcagtggcgcaatcctgcctcactgcaacctccgcctcccgggttcaagcaattctcctgcctcagcctacctggtagctaggactgcaggcgcacaccaccatgcccagctaatttttgtatttttagtagagacagggtttcaccatgttggacagggtggtctccatctcttgaccttgtgatccacccacctcggcctcccaaagtgtgggactacagacatgaaccaccatgcccagcctatgtctaatttctttttagcctgcttcctgctttttttttttttttgccacatgattctggagaatgccaaccgatatctacgagatctgtgaaactgagttatacatataagaactactttgtgaagaagatttaccaggacacatgcaaaggatttggtgcgagaaatttccattgtaatgctgtacatgctcaggttcagggacttctaagagggaaaaaaaggccacagagctgttgtccaatcaatagcctcattaccactcaaccaataactccattaacactaatgatggcttgtttccactcctggcaacaaggtctgtacttgtagaatgactaatggccacttcatacagaaatccacgccatctcctgttcaatgtgcatctgtgtcccaggcaggtgggatgttgttcatagtttatttttatacgctttgaatcatgtaaatctgggcctgatggtgaaaacttgtctgccaagggccagtatgtaacgacagtgatcgtgatgttaattgtggtggcccgtgttcatagcaccatcccacagggactcctcatccatcatttggctttaatgttcagccagtcctgctcatttgggaatcagcatgtcttcttgatgtaatggtaggtaagtttgattgtgaaaatgaggaacgggcgtgctcagtgcttgccgaggggctggcaccgagtctactaggtagaacaggggtttctacacctaaaacatgtcattgcggttcttttgctgtcttggcatatgattaattacttcacctttgtgtgttccttagtacttttcagtagacacaataatgccagctaccatcctgggatataatgctataaaaactaactatagttccttgaatgtttgtgtttaggaggtgatacaggctaaaaatgtgcttaagatcaagaagatcttagatgctatagtaaataataaagtatagaatttaatgatgagagtagaatattttggttttacacagcactttgaggttgataaatggacactaccaggctctctttcagaaggatacactgcatagagcatcatccctgtcatcatcaccatcaaataacacccctttgtagggcttaataatatatgatctgcaaagagctaataatctagtgataggaactctctggcccttaagaatgtacattctaaaatcaactaatcatttagtatatcctcttggtaaatgagaaaaatgtaaatttaagcaaacataattgtggagaagttggacctcttgtaggaagtcatttcaggatgctcttctcatttagttgagaatctcgatgtgttgggtgagcaaagagctgatttcactgaggacgccaagagcactgaatgtgccacataagagagggagaaacagaaagaggtaggctttaagggggtaaggtgaaaccagttgacaactgtgctgccagataagcagtaataatattacttttatttctattgtttaagtaacattggtataagtacctattttaccaatttaagaaagttagttcactatttcagtgttagaacaacatgtagtttataactaaaagcaccttgaaattagtatagatataaagattagatcaaaggggctggctgagcacacccacctacctctccttccctttgctttcattatttctttgcaactttcttcttgcccacctacccaggcaacaagtcctcctccttcccctaaaacactggggacaggagacagcaaacaagaacagcagctaccaacaagcgaacagggaatctcagacctaataatgagtgatgcgcaatcaagaaacatcagacacttgggggcaaagcagcacagtgaagcagaaagaacattccctagcaatagcagaagaatgtctttctgtgaaatttagatttgcaaaatctgaacaccttggaattgttgcaggtgaacatcatgccgtggccagggtagatgggccccgaacagaaataacacttctcaacaagcatgttgaacccgtatgggtccccactgaccaaaggccaaacttgagaggaagtgaccgaatacctttctagtaaagcaaattaatagcaatgctgttagtgccaggaaaagaaaaagggtcatcaattgaaggcaaattttaggtaatccctgcgaaacagaaaacagacagaatatgattaatgaagacaatgatagcctcaaacccagaaagggctgtggcagcaaaagagtggccactactctgggaatgttccaagttcggggacattggacacagggagcagcagggaacctgggaaacctgaaaagcgattgggtcgagaacgacattcagagttcccagttaggtctggccctttgccaagcttgtgccaagtaggtaacagcagaggtgtttgccctcagctcaaagtaatgagtggatgtgccccagggctggagattccacatagctcaaggggaacagggaggctgggcgcggtggctcacgcctctaatcccagcactttgggaggccaaggtgggtggatcatttgaggtcaggagcttgagaccagtctgaccaacatggtgaaactccacccctactaaaaatacaaaaattagctgaatgtggtggcacatgcctgtactcccagctacttgcgaggctgaggcaggagactcacttgaacccgggaggcggaggttgcagtgagccaagattgcaccactgcactctagcctggggaacagagcgagattctgtctcaaaaaaaaaagaaaagaaaagaaaaaaagaggaacagggagcctcggactcaggagatgagctgctacacaccttcctcccaaagagacatgcctcctccttcccctcaaacactggaggcagggcactgcaaagagacagcagttaatgacatgggagcagggaacctcaaacctcacaaccaaggagcatgagacacttgaggggaaacagcaccataaacaggggcagcaaggcccacaaggaacctacaggaggaaggaacctacaggaggaagcatcataaacagagcagacagaataggacaattacaagaagtatcactaaccatagttttcaaccaattttttaaattaatttatttattttttattatactttaagttctagggtacatgtgcacaacatgcaggtttgttacatatgtatacatgtgccatgttggtgtgctgcacccattaactcatcatttatattaggtatatctcctaatgctatccctccccctcctcccaccccacaacaggccccggtgtgtgatgttccccaccctgtgtccaagtgttctcattgattttgaaccagtttttgaaaaccagaaagatgaaattctcttgtccttcttttgtctcatttgagcacaggattatactgggctcctaatgagctggagctggttagcatcacctgcctgtccccccaccccttttttttctgtgccctggaacagtttgcataagctatgagttatttgttccttggaggttttagaaaatacaccccaaaccaccatatgggccttgaacctttggcagacagaatacctcttcaaatgttatttcatttttttctatggttgttggtttgcataagctttctactccactttggaccaactttggaacttttataatcctgtgagttgcctatgtcatctaagcttgcaaattcaatgaagtaaagaaatattaatttctaattttaaaaaactcttttgtatctgtagttaagcctcctttcattgcttctgtttttcattactgtcttctttctggtttttgtcttaattatacttctaaatatttgtctatgatgttggtcttctcaaatgttggtcttatgatgttggtcttttgaattatttttatttttttgagacggagtctcacttcgtcactcagcctggaatgctgtagcataatttcggctcactgcaacctccacctcccgggttcaagcaattcccctgcttcagcctcctgagtagctgggactacaggtgcccgccaccatgcccggctaatttttgtatttttagtagagacagggtttcatcatgttggccaggctggtcttgaactcctgacctcatgtgatctgcccgccttggcctcccaaagtgttgggattacaggcattagccaccgcgcccagcgctttcgacttttattagtcaaatctactgttttattttattttctattattaatttttgttcattcctttatgattactttagtccactttctttaagtttattttcttgctttttttttctttttttttccctgagagaaattttaaaatttttaaaattttcttcaaggctctaatttttctctcagcacagtctttgagttgtaggtctttttgctgtctagtcctaaagaattttgactttgacattctttttagatgtatttttaaaaatacctttaacataaatatgtatagttgctagaaattcgtattttgtttgcttgttaagtccttttaatgattaccatatcactaaactgtggtagtgaattcagactgtagacaaaatttttaattttttgttgagcgttccttcgtggattagggaaatgtcaaattgtttgaaaagtgcttttgtgaaaataattttataatatctctattacagagatatatttcatatatcatacaatttatcaatttaaatggttttgagtataattggtatgtgcacctgtctacctagtcaattttagaacatttctatcaagccaaaaagaagcaccatactctttcactattatcctctgtttcttccccaccttttccctcaccgagaaatgactaatttactttctgtctctatagatttgcttattctggacattttatataaataagatcatataacgtgatattttatgtctggcttttatgactaagtgtaagtgttcaaagtgttcatccatgttgtagcatgtagcaatcaacatcaaatagaagtggtaagatacgacattccttccttgttcctgattttagggagacagcatccagtctttcaccataaagtatgatgttaattacgaactttttgtagatgccctttgtcagatggaggaagttccatagctagtttgtttagtgctttttatcataagatgctgtcagattttatcacatgatttctctgcatcaattgagataatcaatggttttctcctttcttctactaatttggcatattaatttaatggatgttccagtgtttaaaaaaacactgtgtgcctgcgaaaattcccccttggtgatgatatataatcctttttatacaactctggattcagtttttcaatattttgttgaggatttttatgtctatattcataagaaatagtggtctatcaatttctcatgatgtctttggttttggtatcacggaagcaattgcctcatagaatgagttgggaagtgttttccctttttctaaatgttttggaagagtttgttaataattggaattaattcttctttaaatgtttggttaaattcactagtgaatccatctggtcctgtggttatctttgtagagagttctttattactaattcaacctcttttctattggtctgttcagattgtctatttgttatcagtttttgtagtttatgagtttataatgaatttgtccatttcatctaaattatccatttattgacacacaaattatatttctttataatcttttctatttctgtgatgtccttttttatttctgagtctagtattttttgtcttccttcttttttttcttggcaattctagttaaagctttgacaactttgttcatactaacttcattccagtgagatataaaaatgtcactgctatagctctattcacttcctcactttctggggcattatttttatacataaactaatgttaaacatgtaacactacattttaataattattatttttataattttatgtattttaaaggagctgttatgggttgaattatgttcccccaaaagatatgtactaagcctcagaacctcagaatatgaccttatttggaaatgggcttattgtaaacatagttagttaagatgagataattttggagtagggtaggcccttaacccaatatgagtcgtgtctttacaagaagaggagtgagaaagacataaaaaggagaatgccatgtgaagacacagagacacacaaggagaagaaaagcacagggaaggcagactggagtgatgcatctacctggtaaggaatgtcaaagattgctgaacaccagaagctaagagagaagcatggaacagattgtcccccagaaacctgcaggaggactcaaccttgctaccaccttgatttcagacttgtagcctccagagctgtgagaggattagcttacattgtttcaagccacttagttttgtgataatttgttgtggcaaccccagaaaactaatacagaagttaaggaaggaaagaaaaaaagtaagtatatatgtgtagcttttgttatttcagtcttcttatttattatgtctggctctctttatttgcctggatttgagttgctagctggagtcattttctcagccaaatacactttttctctcatccacttgtgctgttattggcatatatttctatatattatagacccctcataacacatcatatacatatacacacatgtatataatttctaacttatgtatataatttatatcatatatacacacatatatagttttatacaattactttgtaaaacagttaagggaataaaagagaagaaatatgcatttatactgtatgttataattacatgattatgtttcctggtggtctgtgctttatcatggggattgaagttactgtctgggataatttgttttcagcctgaagaatttctttagtgttttctgtaaggcagctctgccaataacaaatactctccttttttgcttatctatgagatatttgcctgcattttcaaaaaaaaaaagctctatttgcctgcatttttgaaaaatagctttgctgaatatagggttttttgttgacagttttttttttttttttttttttgcttactttgagcactttgactatattatcctaatgccttctggctctcattgtttgtactgaagtcagtggataatcttataagagtttccttgtgagtttccttgaaggttcccactcagaagctggacgtcctgcttgagatattcttgaaagaatatctcaaatggaaaacttaatattttacagtgcttaaattgttatctatagagcagttaaggggaacgataatcttataacaggatctgcatgattcttggacagtgattgtttttttttttttctggctgctttcaagatgttctcactgtctttggctttcagcatttttatggtgatgtatctatttgtgaatatctttgcatttatcctatttgaggtccatcgagcttcctagttgtgtagattaatgatttttcatcaaatttgggga

SEQ ID NO: 7 - DNA, 45770 bp, Homo sapiens
  allele (1)..(45770): CHST10 Variant Allele (rs6716367)
tgaggcggtgccggcgttctggcccccaaagccggtctagcgcgccgggcgtcttccttacttccgctgccgccgccgccacatcccgggacccgacgggccgcggcgcggaggcctcggggcaaggtggggcgggcctcccgagctcccaggaccccgcgcgcttcgcccacaggcccggcgaagcccgacccgcgcggcgcccccagggccaggggaggagcctaaggacccggacgagcgccgctccagtagggtgagctcggggacgcgcaggcgggtgggtttcagcgcctgggcccctctccccgccgcggggcgcacggaaaaaccggggaacccgcgggttttgtcctggcgagccacatcccggtgtgttttggcgacttgaagacctccctagttcgcgggagtagcgggaagagccttcctcgcgttaattatgcaataagaaggcgtccttgtgcgggatgctgtgacccgcggaattattgatattgtgcgagcctacaatttacttctttcatccttggctgagaatttgcgtttgtaattgtagatggagagaggaagaaagggttcagcttgggtccaaggagcatgcagaggaaggcagggaagaaggagcatgtgcagcttcggtgcgaggggagtcaggggtgggaatgcacgttccctgcctgaggggccccggggtgccctgagcctctgatcttcgctgtcaggaggcctgtccgaagttggaggttgaggcatgcagttctgcacttctggctgggaaggtgaaccaggttttccaaaatgtcatttttgctttccaagtctgcaaggcaggaaagggttgggcagtgaatggaaagtagtgcagccaggttctggttagctcagcggcaggactgtcataacggtgggtttttgttgttgttgttgttgttgttgttttgtctgaaaaccagagtctggggctttgggccatgaggagttgggttattgcattgcttagagtgccagagtgagaaatgtctcagacgctgttaaaattaggcagctcagtttagctctggctctctgataaccaaccacctcctccttcactcttttcagtgactgggttaaaatgaaaagacacaaagagagaagtggtcttttcccttccctccccattataattaagagcttagtccatcttggctcagaattggaattcagaattcagaattgctcttgaccctgaagaatagaatctcaaagaaatacctgagcagaaaattctcttcttcgctgaaatgaaaattggagtgtttgcaaaactgaacaaagaaaggaaagaatttgtaaacatcacaggcaacttgcagttatattcggatcatttttcagtgtttgaggagttcatacaataaaaaggtgagagagagccaggaatagaaacaggggagagaggtggttgcaggaccttagagattgcagaaacccaggagttcattttcttttcatacacttctggataacctggatgtgaggaccatcaaatgccgtacatgatgtttctaacaatgatggaccacatatacaacagtggtcccataagactatactaccttatttttactctaccttttctaattttagatacacaaatacttaccattgtattacagatgcttacagtattcagtacagtaacagcagtacaagttagtagcccgggagcaatagatgattccatatagcctaggtgtgtggtcagctgtaccatatagcctaggtgtgtggttagctgtactatctaggtttatgtaagaacgctctgatgtttgcagaagaacatcgcctaacgatacatttctcagaaggtatccctattgttaagtgatgaatgactgtatataaagcttaatctttcaatcaacataataggaaattgcttttaattttagcattgagttcttagagtaaagggaggcagagagagaccgtgctgcatgtgtcccagtcagcttgggctttattgtatgttaaatgagttgtatgtttattttggtagatctcctaaatccatgatctaattccatgactttggcttgtttctggttttttatgatatggcatttggctaaaattttccaggtgctaaaggtgtaaggagtacgaaaatccagagaacattttgcattggaagaattgatcatcttgtataggaatcctataactatttcaaacatacgaaacaggcataattggatttgattatttttgctacaaaaaatgtttcatttttcacactaagttacatggaagagtcttttaaacagctagtggttttggtacatttagaatattcatttaccaagaaatccaaatataacctgcctttgtaagagacccattctgccaaatatatttgaatcatcaaaatggttcactatttccttcctaagtataaaccaagttgtattaagtaagttgatcttgtaacttttaataatgcttttttttttttaattttcctatccagtgacaagaggaaccaagaacctcagttcaggggaaacacagcaaggaaatgtgagccccaggctgcagaaggtacgtgaaggagaatgtgagctcatcagttatttgagcatgccattcagtattgttcctgccttttttcttgcctgtgcagattgtaaactcttgattaggagtatgtaaatgtgtgcttagaaacgtttccttaaatataataataggagcatgctctgaggctgggattatgtgagttagtacctgctgagacctgtgcttggtacagagtgaaccccatacaggtgtttactgtatattattattattgttcatgaaaacctgtcttaactacaggtgtatttctcactggacagttaagagtgttttcattctcctaactaagggtggttaatcgttccaaggcggtaaattgtaaggatgacaacagagaagacaaaggaaatttctgtacgcagattgagagaaacctttactatgaatttgaaagtctcagtgacatgcaatagaactttatagtataaattcatatgccacactttgcattatggagttgtaatttaatgattctattgatagggtaatgcattgtagttcagaatgtgctcagggttgatggtgaaatgtccccgtttctgcagccctggtctgtctagttctcatctcacctgtcatcctcctggggttaccagttccttgtacattaccaggtttttgtgtgtgtgtgtgtgtgtgaagtttcctttagagtctggctgtgttttaaaagttgagccctggacatgtgatccctggtatgtgtatgaggtgaggttgtcagtaaagggccattgacaggcctcctcatctgacccacccctgtccctgcttgcccactctgcatgaggaacactggccttcttgccacttttggaattctgggacccagaccacagtctttgcccaggggtctgcatggcttgctcccacaatctgtcctgccttttctcaacatcctgcccatgcccttgtttattagccactgcacctgtcacctggcttgatcatatacattgatcacttgatttgtttatggcccgtctatgtctgttagtaggaagcactgtgagagcagggaatgtgtgttgctatatccccagggcctagaacagccccggctcagaggagggctttggtaaatattgctgaatgaaaaaatgtctggaaaaagcctggttaagcagagttaagtgggcttatttaccatgggacttttcagaaactttagtaagtgaatgcgcatattaaaagtggggcctggcaggtgggaggcaaactcatcagcagagtaagaaaggcgctgtgcttctggatgacaactcagacatggggaaaagctgctggcgggaatggtattggcagctgagcaaaatgaatttacaagtttccttttcaaaatgcaggggaggaaggatttgcatcaagagatggtaatagtaacatttccattgttagttattacaaacatgtacaatgtgtgctatttatcttttatttaaggtggggaagggggaagattagggcttcttgtagattcttccttccctgaccctgctttccccataaggccttaagttcttcagctgccagttcatccttgtgggttgaactgaggaaccaaaccctctggcttggtttcagatcctgacatcttgacttgtgaaaatcccatttaatgactggaagtaggaaagctctgaagatggatatgcagattctaggggtcaggaggctctgttcagggcctgcgccatgaccgaagggagggcgtgtaggggctcaggttctgctcccaccattagctctagaggcactctgagagttgtcttggctccttgaacaaaggggagttaattacagaaaatgccaggctttttaaaggccatttgtcccctagctgtagggagagcagcagcccttggcagagccctgaggaaagactctttatgtcaggccgcagtcctcttgtagacagaaataatgagccttggtggtgtcatcctcagataggaggcaaaccccatggtgaaattctgtattcaaggaaacaatgcagagaatggggcggacttagaggagctggggtgaagtgaatttggaatgcctctcttttaaaaaaaaatggggcagagttttgtgttgttttccaaagtcagacaaagcctgattctacagagtctagttaaccgtagatgggagggctgtaaaggagagtaagatgaaggcagtgatggaaggtcttagattctaattaaacctcttttagctgtgtatttggaacacttgtaattcagagcatcaatagactctcgttgactagatgcttttttgctgccaattttccttcttaagatggaaggaggtggtgggagaatggcgtttatgccagaatgcctagagtctgcattttaacaagatccccagggggattcatgtaggcattaaaatttaagaaggggtgaggtcctggaccagcaattctcagtcccagctgctcattagagtcacgaacagagctcttaaaaaatgcctgggtactgcctccagagatttgtgttgtcttggctggggtattcttggggcccggggtatcactgtatttcttggaagtttcccaggtaccgccccagacataaagccagacaccttcaggtagatgtctagattcagaaggcacataatcccgaagcaaatgacaccatgcttagctgggcacaccactctttaggattcatcaaaacccaccacaccagataatgtggatcctcgtagctcatccgctggcttctagagccacagccagagatgatgggatgtggagcacccaaccggggttgcttgtgccgggttagaattctccctcctccatgaatgaaaatgaccttgagactgggcagtggctgagtgggcatttgctttttgtacctctgactctgctgctgaagaaactgtttcaaaatttaaatcagatcatgacatcaccacccctcttttcatgtaaaactctcttcaggggctcccattgcttgcaaagaaaagaccataatagccctggcaggccccatgttgtctggcctgcatctgcctcagcctgtgccccagaactccagccacatgggcctgcgtttagttactcaggggcccattcccttggcctggaaccctgcccttcaccttaggtaactgtgctgtcccagaccactctgcccaaggcacatcccattgtattttctccccacagcaccatgtccctctcacaccatcaagtaccactcctcagatagcttctttccttcgtgtgggcctgttagacgacaagctctgtaaggacaagaactgtgtgtgtttagttagggactcagggtcatatccttggcagctgttttactgcatgaatgaatacactggatactggataatgaataatgagcttgaagtcattatttttaggttattttgtccttaaacttgtatgcacatacacacctactcatgtttgagtgctgtattttgtaaactgtagagatattggacctgagggaagtgggtattttgagagagtactgggctgtagtcttactggttctgattggctcatgtaggatgtgacttgtagaacaagtcccagttttctaaatttttaactaggccgggtgtggtggctcacgcctataatcccagcactttgagagtccaaggcaggtggatcacttgaggtcaggagttcaagaccagcctggccaacatggtgaaaccccatctctactaaaaatataaaaattttccaggtgtggcgtgcctgtaatcacagccactcaggaggctgaggcaggagaatcgcttgaacccaggaggtgcaggatgcagtgagccaagattgcaccactgcactccagccggggtgacagagagacacactgcctcaaaaaaaaaaaaaaaaaagaaaaaatgcttattacaaatatttaaaatatgaattgtataaagtacaaaaagagctcttactgtcctctcatgattttattctatgtattacatatatgtgtctatgtttgtatatgtgtgtaatcatatatatttcacacatacatgatttttttaacaaatgggatcatacattccatcctgcaacttgtcttttttgtttactggtatatcttgacactttggatatggatctatgtcattggcttgcctttcatcatagagttttatttgaaatgaaaatgtttttggacttcggcatgatttcctaaaccccccaatcaatgtgttttaagtagtaagtgtatttgaatgcatatacatgctgtggcttagatcattttgttttcaaataatactgaagtcctcatagcatttggttgttttctagtctcagttaatggatattaaacatagaactgctctgtggagactagagaaatattttgaggttgaaagggggcctcattcttgaaaaagcctggagaccctcagggagagggttgggcaggctgcctcctgaagtacctttccacattcctgagttctagtaagttgctcaattgacacagtcattcagcaaatagcaattgttggctcatggtgcgccaggcactgtgctggtccctgctgtcctgaccagcatgagcccatattctgcaaggagagcaaatggcacatagcgagagcatctggactgtgctgggtgtagtggaggaagtggagcaaggtcaggtggcgcagagcggtgctgggggtgccacctgggtggtgatgaggcagagctgactcttcctctgctgcccatgggaaagggagcaggccctgcttaccccgagtgtacaagaagcccagtggccgggagcagctcctcagagagctccctcctggaccccgcagtgactgcccacaggctctgtggcctgcaaggggctctacagccagatatgggcatgctggcaggcagctgtgcttgaaatgctgataggggcctggggtgtaatgctcttctcaagagagtggttttggcagggctagggttttgcccctgaagctttgcaaatccacatcccccactggagtctccacgtgtcctggtaccatcccggggacaagaagcagggaaaaagcaggggaaggaggtgggaaccctgcagtccacccttctcctatcctaatggagtggccagggaagggactctctgtatatcttagtttagtaagagtttgcagaagtcaagttaaaaatggattttttgaaaatgaaatacccatgtgaaagaacacattggatgatacatggtcagttgcatgattgttgagaaggtcttctgactgatgagtgtgcaggtagctgtttgttcctgtggatgaaaaatgggagcccgaagagctcttcattgacacacccacagccacctagctagggagagggtgagtgtagaccagtccctgacctcctgcccgggtgaaagactagctacggagacggtgagtgcagaccagtccctgaccccagcccaggtgaaagactagctagggagagggtgagtgtagaccagcccctgaccccccgcccagctgaaagaagctaagagctcctgacttttaaatgaaaatccaatacttaggaaggcacatatggcttcaggagagtgcacctctcagttttcaactcatgtagttggagaaatcctatccctaggccacctggcttcctggagaacagaagaggtgctattcattttcaggtaaggcttcattatcttcccactttacctgcagatgagctcagtgggcgaaatcatattacattccttcagaagactagttccattggaaagatttgattcttaaactataaaaacctccaaagtgctgtcctgaggccgggcgagggtgatcaggggttggaagcctggagggaatgagcagagcaggcagtggaatatgcagttcccaggtcctcccgccacatgctctgcagagtcagcgcgtcacctgcaggagggaggcagtgcctcttatcgttgttccctttttcatagcactgatcctaggagagggtgggttgcaagccccaggacactcagagccaggacctgtctgtttagaattgcatgcaacctgcgtggtacatcctgttccttttactccctccccaacccaccctggtgcctctgctgcttggttagaaatggcctgcagctggcatttttcaggggggtgctctcactgtgacccatgaggatggacccccctgagtgcactgtcttagagggctgagctcagtggacttggtactgctgggccctgcatcctctggccacagtctaagcctcagtttcttgaagggaagttagcagttgctggaataagagtgtgtcttgtttttttctctcttcttggtgtagaccctactgtcgcattaatttctggcaaccacactgagaaaggtgtagattaagctggaaaatcacgaagagtgccaagggattggtcagtttttactgggggtctgcaccaggccaggtgggtgctggttttttgtctacattgtctcatttaatcctcatggccactctgaggtagtggtaggaggagggccttctattagagatgggacattgaggcttagagaggttaagtgacttatggagtcacagagctaatgggtgtgagcagggatttgaaccaagtctggggttctttgtgcctcactatctctgacatggagtggcggaaggaggaggggattgtgggatggagacaggagacaggacagctggcttgcaaggaatttggcatgcccctgctgggtggtgttgctgataaactacagtacactcggttaaatgtgaagttcagaaaacaacacataggtttttgtttttgtttttttttagtataagtatatgtaatatttgggacatactttatactaaaaaaattaactgaaattaaatctaactgggtatcctgtgtttttatttgttcaacccgacttggggaacctgggaaggacactgggcctcatatctgggcacaaaaaatactggttttgggggggagtataagtatgtcttatgcaatatttgggttatacttacactaaaattttatgttatctgaaattcaatcttaacttgggggatgtcctgtatttttatttgtctaatcaggcaaccctattggtgaccccaggaaacacacgaagccttatacacgggcacctgagggtggtttgcgagccatccggagaaaacccaggcagcttggcaggtggtgagctccccactgcaggctgtattcaggtgtggccggataactacgtggtgggtgtgtcatggatcctatttgcattccagatgcctggttcctgtgagattctaggatgtaaatgttgagacaaggagagtgattcacctgggtcttcatggagctctgacccacccagggttaggaggctctctctgaaattatttgccatcagcactgtgttgaggggaccacttctccctgccatgcagaagtgatggatggcctcagtcagtcggtggaagccagctcagcccagggtcttgtctgtacgtggagagctttggcttgaagaagcactgtgttaaaggtgaaatgaaacacactttcttgtgtcacctgccaagaactgacagtgacttcccagttctttatgtgcctcctgcaggagagtgtggcttctgtgccaggctgaggaccgacatgccccgtgttgctccctggctgtgacagcatgaaaaacacccacctcagtgttctacccaggccgctgctggcaagtgggcggaggcgagaagcgtcagtgttcattcctttgcttttttagagcttctctaggtgtggctacatcttgtcagccagtcagaattttaaacacagccagctcctaattgccccagcatggcttctgcccactatgaatgaccctcagctaaggcctagtccttggcaggcctcttcctgccacctgcttccagaccatcgtgggagctcactgggaccttagcctgggcccaacaggagtcagggatcaaatgtgcaaaggagtcttattctgtgttctgagaacacaaggaagtggtcttctctcattatcatgtctctccattagggtgttctaaatttgattttattattgaatcaatcatttatattattaattcaatatgaaatgttaaatgccaagtcaaactacctattgtagcagtggaaaaaaacggaaatatttgtgctgatacttactgactgaaatcacctgtcgttttcattcctctttgttgacttgatgtatttgtaagcagcaggggcatctcgcttgtgttttccaggaagagtcagtgaatggctgcggtgtgacaacatgcaccaccagtggcttctgctggccgcatgcttttgggtgattttcatgttcatggtggctagcaagttcatcacgttgacctttaaagacccagatggtacgtatgcttcatggtggaacgaattttggctaatttagacctagctgcaacactgttcctaggtacatgcatagatgacttctgtcacagagtcaaaggactttcatgccagcagggaccttggaggtcatggcctccgttccttcatgttacagaggtgtgaggggaggtagggtgggaggggctggagggtcttttcaagcatctcctctggaggaaggaagctgctctttgtggctgaggcctgggtggtgcctaggagcaaggagcagggtctcctcccagcagcacagtggccttatgccttgcagcagggcgcctctcaggctcgcagttgggaattctctttgcctcatgtcatcatgagaggtgcagcctcaactgcttggcatgcccgtgtggtggccacatgtttgaaggtcaccctccatgcagcggaggagggtcatttaaatgtatgtcttcaggttgtcttggaggctttcttagctctcctttactgaacgtaggcattcagatgaggacggataaagagcgccaaattgggtctcagaatgctgattctacttcgtgctcttgtcatttgcttatctacatcacaatgtttcttccaccaaatggacaccctgcctgctccggcaccgcccatgattgccctgagcatggtgaggtgctctgtggtctgtggagtgctggatatgtccaaagaggtgtgtgatatgctctccagccccgaggccacttcattgagtggccaagcaggcaagcacgaggaagccagacacatggagtcattgaagtcctcatttgtgccgtggattggcccattcctttaggctgattgggagatactggggaacgtggatgagcacagcactttgctgtgctctgcaccgtactttgtcctcctgccgatggtggccttggaaaggggcagttagagatgcctctgtgccagcagttcttcctggaggctgcactgacctgtgctgtctgtgtgggacaggcccctgctccacctcacagagctcccaggcatgtccctggctgtgtcaaggactgcccgatgtcctacacctcctgccccatcctctctctgccccaccttgtctgcagagggacagcaaggttagaagggaggtctgcagggaaaagagggacaccctgaaattagcccacatggtggttctccccatgacagttgttgggccctgattggctgtcatcacatgtcctgcctcatcctccaggagccctggagagaaacctgtgaggtctgcacagcctcgggaggtgatattacacctgcaggtatctgggcaggtgtcactgagcatgacagctcacgcccgggactcggggttccgtcagcagagcaagggtcgattcttggagggttgctggaatgtgacacgatgatctcagtttgacagtttggacatttccatggcagcttcagcacagtgccatgccactgagagatccctcctgaagccctagagccgggttctcatccccgcagcacttcagaatcacctgtgggactttacagacctgctgctgcttgagacccagtgaaggagaatcactaggggtggggcccagttgagaagcacagtggtagatcctagctggagaactgaagagaaacagagctgctgagaataagaaataggtgttactcaggattctcctaaatgtcacctcctggtatggaaggcactcaaaaggcaggtcatgaggttaaattgtttatggtttattttgcttaaaaaagtaggagtagatgtaatacattttagtgagacttctataggtaatagttaaataagacttgtgcctttgtgttttactgttatctggcagaatggcctctaaagaatgccttgtttcccagcggcatctggtaaatgaggtctcattctcctttgatgtatcaagttttgtgctgaatgttttcagtgtagacactgatcctggaagctaagcaggggtaggcccggttagaaaaaaagcaagtgtaggcgcagaacagggttttgtgaagcggagaaaaggagtggtaaggagtgttaggagataaaacctatgaagaaagatgaagggctttcggattttacacctggagaggagcaccgcagcggtccttaatactgcctgtgagatctttccagccggctgccttcaggcgagtgaaagggggcactttccctgccctgtgagatctggtgtggtgtgtgggtgctgggtcactgagatgggagtgctgcccctgaccccgaggcaggggctgctggtggtgaggatgctgttggccgcacagtgtgcagtgaactcagtgagaatcttctgttgtgggcccactcccgttgcggggtgaccaccacagcactacccagcctgcctcactcgcgtgagatgttacctaattgtcccaagggacctggttaggttaggatcctgaaggtggatatccgccagctgagttctggatgcaggatgcgagctggcacccagcatcttgccagtgcacaaggacgctgggctgaagcatcaagagcatttacactcagagcctgcccctgcaggcgtcagagaggccctgggctggggtggtgtaggcctctcccctggagcctgcccttccagcactgtgctttagagagtgtgtcccggagcctggatcttgggcagcacaggaacccctctaagctcgtggccataaagggcttctcacatgttggagtttatttcacacacgttcacggtgtttttgattatgaaccagaagcccattgtgaagtgtcaagaccaggaaataacagacacggcagtgtccacggtggggagttccatttcctggaaagtgcgtggagaagccttggcctcagtgctcccgggctgctcctttcagctctgtcctctgggacagggccagcctcagaacccccatcagtggtgtgcatgttcttctcacctacctgcctttcccggtttctcctgccactggagcccctaggaagagcatggttgtcgtgagttgctgtttaaagcaacacttactttttttagtgttacagtttctgttcagctcagcagtggagccagtgatatttgtggcaatgatttatcctcagttagcaaatttcagtatcatattgaactaggatcaggtgttgtaactagactttctcataagaaaataaatccccctcagcgaagggaatgtgatggaatcatatggcaagactcaaaatgatgcccttgtggacctggtttgtgtttgtaggcgctggtttttcctctcctggttgacttcctcattggttctgagccgcttgagggcagagcctgtgatgtgaaggtctctgcagccttgaccatctttgcatgtacttatttgccatctgcggatactctccagtgaaatgtctgggtgtatcgtacctattttctaattagattggttggttttttaattgttgagtttgaggattctttatatattttagataggagtccttggtcagataagtggttcataaatattttttccctatctggagcttgtcttttcctcctcttcaaatgggctttcacagtgtagattttctctttggttgttttttaaaaagattgatggttttatgtttcacattcaggtctgtgatccactttgagttcattgttgaataaggggtgaggtttggatcaaggtttgttccgtgtgtgaatgtccaggtgccccagcaccatttgttggacagactgccctcctccgctgaatggcttttatggctttgtcaaaaggcatttgggcatctttgagagcttctatttctggggcctctgttctgtcccatccacctgtgtgccttttccttttagagaagacattcaacctctctgtcttccagtgtacagtgccaaacaggagtttctgttcctgacaaccatgccggaagtgaggaagttgccagaagagaagcacattcctgaggaactgaaggtgggcacagccaggccgtggtccttgtcctcttgaacacggcacccttgtcgcggggagctggccttcccctgtggctggttccgcttgtcatcacgtctgcgttagagccttttcctgtgttacttctccatgttagttcaccttgttaatttccatttgggagaggcacaggtcacgtctatttttgtgcccctcacagagctctgtgcatcagggctgctctgtcactgttggttgtgcagcattcctgaccagctgaacatgagccttgcctggggagccgagagtattgggcagggtcaggaggaaaccagaagtgggagaagacatctcacccagtcatggggttttagagtgaaagggggccctggacagcagaacaactaattcagcctccaaattgtatggatgagagaactgagcctagaaaaaaggtggatcctccacagtcccatggagttcctggcggagcccaaggctgctgacttccacccagcccttgctggcttgacattctggctccatggctctctgcaggcttcttgtgcacctaaattcctgatcattccctagctgggatgaggggtgcactctggaaggcctctcacttcgtaacccccattctggatctagagggttgaagttgcaattgttccagaaggaatgaaatgggtacagcgagccctaaaaatatttttagcccagaatcaagccgtagaggttgggacagctcctatccatgggtcacagtgtaaggatgataaattagaactcaataaacatagaaaacatacaccagtcagtagagtgctgctggaggttacttctcgtaggacattgatggaatggaggccaagtttacagaactctgagacagcctaaatgttgcttttaggttgaggcatcccagggtaagaaaataatttggatggggtacagaaacgaaaccaaaaaatcttatgggaaataggagagtggctttaataggatggatttaataggaaatcaaagttacatggataaaaacaaaggtagggtaagcctttggcaaagtgtcgcaacaaggttccctcaaggatgccataccctgtgaggaagagggtggtcatcttggtgctccctctccgggtggagggtgctcccggagagattgccagcctgcaggagtcattgcaaataaaaagactgcgcctgaatgtgctttacagtttgcagtgtactttactgggtttcaatctcattggtcttccgagccgccctctgaggtatatttttattctgtttgcatttgggaaacatgaggctcaaggaactgtgctcactgggtcagtatcccctggacagcaagttgtgggcctgggctttgaactcagtgtcctctgtgcccctctcttacccgctgccccagtcattctcatgagactcagatgggaggtgagggaagtgggggatgtcagaggtgatgtccgctgaggccacatgccgttaggtgacaccaaaactcagcatgtgtcttctcacaagaaaggggatttatcaacatgatcagattctgtagctcacctttaaaagtttattttggccaggtgcggtgcctcactcctgttatcccagcactttgggaggccgaggcgggcagatcacctgaggtcaggagttcaagaccagcctggctaacatggtgaaaccccatttctactaaaaaatacaaaaaaatagccaggtgtggtggcatgtgcctgtaatcccagctactcgggaggctgaggcaggagaatctcttgaacccaggaagcggaggttgcagtgagctgagatcgtgccattgcactccagcttgggcaacaagagcgaaactcggtctcagaaaaaaagtttactttgtgcatggtgtagccgaatgtttgaatggaaaatagaaaataatatttgtctttaagttggctttgtatatttccaaagggaaaaaagaaaacaatgctcattcttacacacaattgaacaagaaatcttttttctttagctgggcatggtggcttacgcctataatcccagcactttgggaggctaaggcaggagaatcgattgcgcctaggagtttgagaccagcctgggcaatatactgagacctcatctctacacaaaatacaaaaatcaggtggttatggtggtgtgtgtttataaccccagctacttgggaggctgaggtgggagaatcacttgagcccaggagttggaggctatagtgagtcatgattgtgccactgcactccagcctgggtgacagaacaagacctcgtctcttagaagaagaatttttgtctctaatgctttgctaaaagaaaagcaatatctaatatcttttctttgttcaaagaaaagcagtatctaaaagtgcagagttttctgcattttctaaagggaacttgttgggaggtgctctctcctgatgcgctgttcttgagtgccatccatgatcagggttaggtttggaacagagagggaggagaagacagagaggctcttttgggataagtgagcaagaggtgggatggatgaggaaatgaggttaaacgagacccgttcttgtaagagcaaggagagtgcctggcgtggctcctggttttccatggtgggtggagggcccgggcagccgctgatgccctgtggggaggaacggaggccactctgcaaaggggcctctcgcttccccagtgtcttcatctcgaaaagcaggcagtcagtagcccccaggatgctcttcccaccaccagggaatcccaggaaattcacttaaacacacaagggagaaagcatcctggccagaggtcatgagtgtaagagagtttggttacagtagatccataaaggaagagctgggtggggggccctgaggggggacctctgtcatcctgatagttccagcgtcccggttctagtgtgttctagaagtcttatgtccttcccattttctaactgacgttgtcccctgggaggacaggttgttaaaactaccctataaatggatttcctggcaagcccagtgcattttaaaagatataacaaggatatttgggtccattcaatacaattatttggaaggatcatctgctttgaaattttgggaagttctgtgtagctttaagagatagatatggccgggcgtggtggcttacgcctgtaatcccagcactttgggaggccgaggtggcggatcacaaggtcaggagatcaagaccatcctggctaacacagtgaaaccccgtctctactaaaaatacaacaaaaaattagccaggcatggtggtgggcacctatagtcccagctactcgagaggctgaggcaggagaatggcgggaacccgggaggcggagcttgcagtgagctgagatcgtgccactgcactccagcctgggccacagaacgagactccgtctcataaaaaaaaaaaaaaaaagagagagagagagatgtagcagctgaagccttaaaaatgctgagaaacagggccacaactagagggggccgatggggttggtggaggctgccctgctattcaggaatgccctcaggatgcctccagagaacaaggaggtgtgagcagcaaggggactttaactcaccgaggacagggggcctctgagcaacttctgtgtgtactggcacatctccctgtgccccctccaacccatgcacacacaaggcctctcacattacaggtattctcttaggttctaaaacagccctgaaaagaatggaccagcatgtagaatttgagctttttcatctttttccccctagctagaggattccaaacttcttactttggtttttaatttcttttttcccccaagacggagtcttgcttgctctgtcgcccaggctggagtgcagtagtgcgatcttaggctcactgcaacctccacctcctgggttcaggtgattctcctgcctgagcctcctaagtagctgggattacaggtgtgcaccaccacacccagctaatttttgtatttttagtagagatggggttttactatcttggccaggctgatctcgaactcctgaccttgggatctgcccaccttggcctcccaaagtgctgggattacagacatgagccactgtgcccggccttattttgttttttaaagtcaaacttctctccaaagatctgaggaaccaagcttgcattcattttccttgcccagcctgccgatcgggctggtggagaggctctgaaggcctcatgaaggggctggggatagtgggtgtcactctgtagacagacaaggaagggaagaagagaaggctccagatggaaaggaggggatagaccagcaggagcggctctgcttggcccggtcctgcctcctttaatggtccctgggcctcttctgctctgtgtcacctgcagccaactgggaaggagcttccagacagccagctcgttcagcccctggtctacatggagcgcctggaactcatcagaaacgtctgcagggatgatgccctgaagaatctctcgcacactcctgtctccaagtttgtcctggaccgaatatttgtctgtgacaagcacaagattcttttctgccagactcccaaagtgggcaacacccagtggaagaaagtgctgattgttctaaatggtgtgtgtgggtctactgaatgtccactgggaagggtcttggtggccggtgctgaggaggctggggaggacagcaaggaggagtcacaagagggctggtttgacctgaagggactggtggccgtccagacaggcctgtttttgttgtttcctgttagtgttgtgccttacaagttagtggggctcgtttagacaccgattcttttcaaaggggcacagccacagtccagctctcctcacctgtcacagcagatcctcactttaggtggctcgcccacccccaggcccccctcctttgtctcttcaggttccctgtgctgatggttatagtcacccactctgtccgacatccccagggccccacactcgcagagccaccaggaagcctcacggtcaccctctctgcagtgagaagggctcacactgtagagcctgggaggggagccctggcccggggcctggagcctctttacctgcagaccaagcgttctgtgccagcgagcaggaagaaattgtaccccatttcacactaagcatctgtgttcagaggattgagtcagcttgcttcaggaaacctgatgtttgctagggaacaaattagatcatcacaaagtaacctcatacactgcagttttgattactcactactctttttagagatgtctatttatttaaattccaattagtctgaaccgatcctaataattatgggctctgcttatgaaatttagcttcagacaggagttagttccagtcaacagcagtgggactcctgggtcagaaatcggattttggggcaccatgggtaggtggccctaaggctccatgtcctgcttgccactcctgatgctgcccacagagtcggtggtcactcctggccactgtttggccttcgcaggggttggctgggagagagaatggtggcacctcatcatctggttgtcacatataattaatgtgcttctgcagtgattggatagcatgttgggttttcagaagcagaatgaggctgcaaatcgaattgaaaacaaggaatatacaaaggctcacaaatcagccaccacagtgtgaagcagcatactttaagaagtaaacacccacttagaagggcagcatagaaatcagagtgggcttgctggatcatgtaatacagaagcgggtggtccttgtggctatcttcggtaaccactagtgcacctggatggggacaggtgcatgaatgggcccatatgtggacccacagagctggttctgtcattgtccccttgagagcagtgctccccacgcctagtttacagccatccatagcatgtaccgcagagttctggactgggctttaaacactcgggggaggaatcaataaaacagacaagactgtgtccactggtcagatggcccagggagattcttccctgccaggactccaatcttaaccctaccggattaacacaaagatggatattaaggcttacagaaacttggagaaaacctcagcatactgacagtgtatttccatttgtctgtattgagaaaagagtgaaaaacctgctcagccaccaaccctaggatggtctctgcccaagttccattcagcagcctggacctgcactggtccctgatgacagaccctggctgttggcacggccctgccttctcgacataccttgtcctcttttgactcctgtctcaaatgtatcacagctcccatagcttagtcagatttttccagcatcaaaaggtctttgctctttgccagcctgggatgctgctggggtacctgagagccactgtgggccaggggcatgtggtgcttggagagcttagcctgtctatgggatggggctgtgaagctgctgcgggcatctgttagcatgacgttccaaagtcctgcttctctggcattttcccccagtctcagagtagagtaagtgttgctggtgttaggagttctgtttgcatgcagcgatcttcctctaatggcagatttagcccagttaggtccattgccaggggtaggcactgccagcatttccactcctgctccctccccctcctccctgaaatcatcagtttcctctagttggcttatggattcccagaagcttttcttcactcgttcatcctgctggcagaagcagttgaaattcaaagacctaaacttggatattgggggtgggcttgtcatgcacacgtggggaacatgaggcccaaggtaaagatgaggtaaggacatgcccttctctaaggggcgtactggagcagccaacctgccttcctttccgtttacttcccaggagcattttcttccattgaggagatccccgaaaacgtggtgcacgaccacgagaagaacggccttcctcggctctcttccttcagtgatgcagaaattcagaagcggtgagaacagcttcctcaaaggggaggggggagtttttgtaaacctgagaagaaatttggggaaaaccccaggctgagttctgtacttggcagattgatcggaggaccacagagggctgtcggtttgcatcagtgagaggcagctaagctacaccccccattcggcgcctcaaaactctcagttccttctgagaatttccagccttaccttcacacagtccattaacatgaaggtgacatcattttgttaatagaaattagcaggcaactttgttctgctttggtaaagttttatagattgcttgctgaatatgatcttttctttataagaaagggatttggattgcagagatctcactgagtatttgattctcccagaggcattgtgcccactgctgtgggagctgcccctgcagtggttgtgtgggctgcatccagcatgggcagggtagagagacggaacccctgatcgcagcaaggacggagtccaggctgggcgcagtggctcatgcctgtaataccagcactttgggaggccgaggtgggcggatcatttgaagtcaggagttcaagacaagtgtgactgacagaaaccccgtttctactaaaaaaaaaaaaatagcccgctgtggtggcacacacgtgtagtcctagctactcaggaggctgaagcaggagaatcgcttgaaccctggaggcaagggttgcagtgagccaagatctggccaccgtactctagctggggcgacagagcaagactctgtctcaaaaaaaaaaaaaaagaagatggagtccttagctaatagatgagaaagttctcatgtagtagctctcaggtggcccaggagagcaaggctgaaaaggagtgaggatgcaaaagcagcggctcacgtcaggtcaccagctggattttgcctcctgggtctgcagccacctgccttgcatggcgcctgacctgcatggcacctgcccatccttacaacccttaccagagatgctcctggtgaggagtgtcctgctgttgccctgagcactcatggggcttttgtgagactcagtgagtgaagacacggcaaagcacagagagcagtttctggcctgtcgtaatcacaccgtgttctgtgatgtcactgttgtcatcgtctttgtcatcgtcactgctgccggccctcctccccagggccatgctctgctgccgcccgcttgcagctcacccagacctgctcctgccctctggagcgtgaagcctgactctctgttttctcttgccccccttcccctggcaatttgaattgaacttttaaaaatatgcccttaaagtaactttccctggcaccatctattcctgactcagagttcctgcccttatgattttctgcccaggaacaaaatttgtaaacattcttgaagttttgaatcattcaagtaaaacagaaggtagattaaatagatgtcttcacagtgactgcctacaatgagtactgtggccttggacaggtaaggttttccaagcctctgttttctcacctgcaaagtgtggtaataacaggattaatccacaggatcttggagtagattaagagacgtgtggaatgcattcatggcagcctcggcacgtgagggtcccatacacagtgctgcactccgctcattcttccctctcccgccccctcagctgtgacctcctgtggcatcaagttaacctcttgttcgtttttttccttagattgaaaacatacttcaagttttttattgtaagagatcccttcgaaagacttatttctgcatttaaggataaatttgttcacaatccccggtttgagccttggtacaggcatgagattgctcctggcatcatcagaaaatacaggaggaaccggacagagacccgggggatccagtttgaagatttcgtgcgctacctcggcgatccgaaccacagatggctagaccttcagtttggggaccacatcattcactgggtgacgtatgtagagctctgtgctccctgtgagataatgtacagtgtgattggacaccacgagaccctggaggacgatgccccatacatcttaaaagaggctggcattgaccacctggtgtcatacccgactatccctccgggcattaccgtgtataacagaaccaaggtggagcactatttcctgggcatcagcaaacgagacatccgacgcctgtatgcccgtttcgaaggggactttaagctctttgggtaccagaaaccagactttttgctaaactaatgcataagacctatgaattcaaatatctttattagacctggggctaaccaggtgaagatctgagcccagaaatgacccttcctccaccacacccctcctttgaggacgcccggggtctcccacaggcctgtgagttgcctcggcatatgacgcagaaccccaactgttacaacttagtttggatgtaagatgctctgaggaccctgcccacacccctgcgtgcattaggatgtcgctggcctttgctcacctcagaggggagaaaaggctaaagatttgcagtttgacagcccagcagggaggaagcatcacacagcgttaggagccgtttccttcaggtgttaaggaaggggatgcccctgaggttctcctggctagtcagggtggcttcacccatcactggtgggttgcaggaacagcacccaggactctgaggagggacagagaagcaagggggctgctgaaatcgcagagacttttgcagcatcagatctgaggagtaaaacggcacctctggccttcatcttggtgctgcgacaattgtggaggcaaagcattctttctgtgactattttgttcctgtagacagtcagcgatggccagagggtggtgtggtgtccaggggtccatctttccagaatccatgcctgtgtaatgctggtccatgcttctgaacctgtgtctgccaagcgcctatttcattcagcacaagacatacgattttagaaggtgaggggaggggaggctttttctacctgagaaggggagtgtctttgagggccttaaaaggaccatggcccaggaatgggggcgctggttgggcttggagctcaggctgctgtggatcccggcgcatcagttctgacttgccttacctgggtggacagcagtgaatctccacctgtcttctccagggagctcccatgttggggctgaagacgagcaggggcaacctgccagcatcacagaattcagtgtagtttatacatttcgattcctttcatctcagcaaaatgggcactgccagagccatttctgatcacaccaccatcctggaccatgtgactggaaggtgggtaaccaagttcaccagcaataaaacccagcgcccaggtagcctccagcagtgcggcttcctggcaacaaggtaggccctggtgcagggcaagccgcagcgaccatttcagataccgtccacagccaggaccgctgagaactgggacagtttcctgggatgagtgccagcctgagcctgcatggtgccgccgagcccggggtggaggagggagccaggcttcgcttcaaggcggcctctaccttttctcagaatggtttcctgattgtgtcaatgtgaaagttaaataaaatttatgtgccaaacctgacatgagctgcggttctgggaagggtgcctgtggccacgcgcgccccaggcaggtggggtaggcatgtgcgcacgcatgcatagctgctcagggtaagcagaccgcaggaggcccagccttcagccgccatggacacgcagggccgaggacgccacactgggttatttttctgtaacgtttagcaaagtcttgttacaatttcagaccaaatgagctgattgattacctctttgctgtttggaatctaactgtggatctgtatatgaatggaaggccttaaagctagtcttaattaaaatagtgttttccctcagaaacaaaattctggcccctggggtggtctcttcctcccctttggcatttgggtcattttcctaacatattttgccacacaagtggagattgctaccatagtatctcctggacatctcactgtgtccacagcaaggatgccgccaagcacggcagcccaccccgttcatttctgcacagccagtacccccactcccctgtcccctgacttccttctgaggctccagatccactaactccctcctcagcttacagcaggtggtgcacctccttctgccccctgaggcaccaccatgtggagggctctgctaccctgtctgggcgttcctcaggactgggctggatggtggcacagctcattcccaggcagtgacaccagggtgggggtggctggagtaggcaggcctagggggacctctgcactaacagcctgggtttgagagaaacaaacagcgaccctgcctccaagaagtgctagggcccggagggcagttcctaaattaggaagtttaataatacgaggttgacttaatgggtttgtgttttagaccgcttctctcctactggatttcactcctagcgcgtgtcaggtttattggtcttgtgttgagaaccactacagagaaatgcccagagctgagatgagatttgattttcacagtggctgactgggtgcacacgaaggtgtgcactcacggcctgcagggcacccaggtggcctctgccctgggttcctgaaaagaagagcctctgacacagcactggggggggtcctccctttcaccccccagctttctcgctctaaaccccggcatgctttgctcatctggaatctccagaagcagggaacagaaagggaaaaatcaagacagcagctaaatgtgaggcgaaggcagcctattggactaaactcaaattatgcagcatagtttcccaagctcctcggacatgccgagaccctcagcaggatagtgcagttacagggctgagcagaaccgcaggctcataggagatgagaggcctgggaagtgccaggacaaggctgcacctatccagcttgagtcaggaggcttcaggcaggtgaggtagccacacttggggagcattacagaagggttggccagaggagaggatgcccagggggatggaagctgcatccaaggtatggcgggtcggctgtgaaaaatgtgggcgcccagacaggaaggctgggcagcatcacatagggcttccaggggtgtgctcttcccctccgggaggaggggcaaacacaaggcaaccaacagctgtgatgattggggtgatagggggttgtccccaaagctgagggaggagcatgcaccagtacagactcacacccctacagcaagtagttggtgcctggaggggaagggcaggtagcttgatgtgaccaggaatggctgtgctctgcaagtttgggtgtcatttgggtaataggggctctggaggatttattttttctttttattatataaatttaaaaatatatgttggctgggtgcaatggctcactcctgaatcccagcactttgggaggccaaggcgggcagatcacctgaggttgggaattcaagaccatcctgaccaacatggaaaaaccctctctctactaaaaatacaaaattagctgggcttggtggcacatgcctgcaatcccagctacttaggagtctgagggaggagaattgcttgaacccgggaggcggaggttgcaataagccaagatctcgccattgcacttcagcctgggcaacaagagtgaaactcattctcaaaaatacatgtgtgtgtcaaagtgatcactgaactccaagtagctctcagcttcaaccgtttgtttttttgttatgtttgttttgtttttggagacggagtctcactctgtcgcccaggctggagtgcagtggtgcgatctcggctcaatacaacctctgccttctgggttcaaacaattctcgtgcctcacccccctgagtagctgggattacaggcatgtgccactatgcctggctaatttttatatttttagtagagacagggtttcgccatgttggtcaggctggtctagaactcctgagctcaggtgatccatctgcctcagcctcccaaagttctgggattgtagccatgagccaccacaccgggccccacagtttttgtataacaaattccctttctcatttcatctgccccttgccccactcacttaccgtgacttgtatggtgcacacacctgagaagctcagactggggatttgagtcccagtactttgacaccagagcccacagcattgactgccagctacattctactgactcaaatccattttttttaaccctgctgttctttggttcattgcccttcattcatctgaccaccccaccaaggcccccaacccagtgcctcccagcagcagctccccttggcttctcagcttgctctccccattcaccatggtgtctatttcaacattgtccatttttctcaaacttccactccattctcatttactgtgggcagatgaccttgtccccgacagagggaacaggtgccatcagatgagcattctccaacatactggctccacacctgcaaacttcctgtatccacacatcctctcccccttctactacagtgggcggggcttgcctcccaccttgctctgcacctccccacatctgttccgaattaccctcctgctctagtgccagctcctgtatctgcaccccttctccccactgggctctttcccggtggcattcaagcacgttcagggctctcgaatcctaagaccatcctgccttagctctttccccatcccacatggggccctgccttacctgtcacccccactccatcttgaatctagcagttttcagggcagtcagtcaattttccagattcttttcttctgtgcatcctttaatttctattgcttcccagtattcttagctcagttcttttctgtcaccactctctctgggcaaggaggcctccctgcagatcttcagttaccatctgtgtggaaataagccccatggggacccaagaacttttgtgtgttttgtccgctgtggtagcacaactctctaaaaacagtgcttggcacaaagttctcaagacttttcgaatgctgatttagacccaagtttgtgccttctgtctgcatgtctttttgagcttctgacacttataccacctgcctactaggtatttcctcctggttgccccacactcatttcaaacttattaattcctgagcagaaccttcatcttccccttcaaacctgttggtttatatgtggccatgatttcagggaacagtgacacaaaccatccaggtgtctgaaccagaaatctgagtcagaatcttggacaactccttcttattcactcctcacatccaatcagtcaccacttccagtagattcaactatttacaggtttcgggttcccggccacttctttccatcccttttgccacctctccagtatgggccactagacgtcccaggcgggccacacccacaaacacagatgcctgccctgctgctccccctgcctctgcctctgattttggccacctgcaatcatttctttcttttttttttttttttttctgagacagagttttggtcttgttgcccaggctggagtgcaatggcgcgatctcagctcactgcaacctccgcctcccaggttcaagtgattctcctgcctcagctgcctgagtagctgggattacaggcatgcgccaccacaccaccacacccggataattttgtgtttttagtagagatggggtttctccatgttggtcaggctggtcttgtactcccaacctcaggtgatccgcctgcctcggcctccgaaagtgctgggattacaggcatgaatcagcatgcctggccccacctgcaatcatttctataccccacagctagagtgggttttgtcaaataaaactctaattgtgttgctccttagctgaaactgttaaatggctccccattgctcttagaaaaaaagtccattttcttccacataaagtacaaggtctttaaggatttagactctggttcctctgcagtctcatctctcaccatctccttcactttcactccatgcccaacccataggctttggctgtagccatctattctcatctccatgagtttgccatggcctcttgtcatctccagaccttgtcacaggctgttccttgcaccccttctcttcaggtagctaactgctattcatcccttaatatccagctcagaaagcatttaggaactcttaagcccaagatgcccttccttgagatacaattcatcctggggcaaaattcctgtccatctgtgaacctatgaccagataagttacgtgcttccaaaatacaatggtgcaacaggcacagacatcctcatgccaaaagggagcaatcagaggaaagaaagggatgatgggtcccaagcagttccaaaacatagtaaagcaaatcacattagggtttatggcttaagattaatcttttttggtttgatgctctgccctccagacccactggagcagtggtctcaccttccagaaccactggggtggcaaagtcactcccatgacttggcctgttgccccacctcctatgttgcccatgctggtctcaaactcctgggctcaagcaaacctcccacctcagcctctcaaagtgctgggattacaggcatgagccaccgcgcctggcctctgctgtcgttagtgtcagctggcagtgtttctgttggtatcatcccatttctgttcctggccatctctgttgagatggctggttaggtccatgctccacacccacactaatctccttatcaaatggtaggtcagccatacccttgttctcttctgaacatgttttcttattttttgcaacatagactgagaatctcaaaatcttttggctctggttcctttttgcttaataattcagtcttcaagtcatttctctcttcttgcattttactacaaccaatcaggagaaaccaaactgcttcttcaacactacttagaaattgcttcagctaagtacttaatgtcatcacttgcaggttgtaccttccacaaaacactggaacgtcaacataagtcaggcaaatcctttgctgctgtataacaaagataacactttctgcattgtgcgatgtcattttcctcacttctgtctgcgacctcactagaatgacctttaccttccatatttctaccaacattctgttcataattatgtatatattctctaagaagatggatgctttctgtacagctctcctcttttctatttttttttttttttttttttttttgcaaaggagtcttactcagttgcccaggtggagtgcaatgacgcgagctcggctcactgcaacctctgcctcctgggttcaagcaattctccggcctcaacctcttgagtagctgggattacaggtgcccaccaccatgcctggctaatttttgtatttttagtagagacagggtttcaccatgttggccaggctggtctcgacctcctgacctcaggtgatccacctgcctcggcctcccaaagtgttgggattacaggcgtaagccaccatgcccagcctctcttttccatctgagtcctcatcagaatcacatttcatgtccatattgttagcatgcatctgaaacttctccattatctgtacatcatccgtttccaaagctgattccacattatttgttacagcagcacccacttcttggtagtaatttcttagtctacttggattgccgcaataaaatactatagactgagtggcttaaaggacagaaatttatttctcacagttctggaggctgagaagcccaagatcatggggttggcagattcagttcctggcaagggctctctttctggcttgcagtcagctaccttctcaccatgtcctcatgtggcagagaaagtgctctgatctccctcctcttataaggatactaatctgatcatgggttcctatcctcatgacctcatctaaacctaattacctctccatggccttaccttcaactaccattgcactgaggattagagtttcaacataggaattctggggcgcacaagcattcaggctataacactatgtgatcgtcagggcagggaatatttacatttgccatagcagcacccaagcctgaaaacaataggtgcttcatgaatgttgaattgacttgttatgttcatgcggatatggcattttctatctggacattcactgacctccttggctacccatatattgtataccttggcatggatgcagcaaccactgaatcttcctccccccttcccctgctgccaggattcaactagggaataagatattaactgaaactccttctaccctcaccctattccaaaaccctatcatgaacagctctcacccgcccttcctgtcccataatttgaggatggggatgaggaaaaataaaagatcattcccacagaaaagtggttgccaatttctaaatgtgtattttctttttctgggccatctcttgccttctcccttagaaaagtgccagatgtaaaacaacaataggaatttgcactttcattaatctcaaagtaacttaagtgtaagatatactttagagatctttgcacataatatcaaagctgtctatgaacattgagcagctcaactcatgtcaggccccactgctttggaaataaaagacatgggaatctcatctcgagccagccaagttggccgtgctccaccttaagacctggaggcccagtgagttcctccaggcccagaggttctaaaggaagaggtagctatgcctgcaagctaagccggaatggaatgggctgagcataaccagaaagaagaaagtatggccacctgtctccacactggtcctggtaataaaatttgtctacatgtagaggttagaaatggtgctttgtggctggatgagaatgcgctttaataagcattcattcaaggacttcatagaaaacccactgagaacccaggtgctaaggaaggaaaagagaattccttttaccttcctcctagatcccttatgcaagaaatagacttggagcatctggcttccaggccctttggttctacactaatacatttactccattttgtaaattcagaactagtacccatgaccctacacgaataagtgaatgggctctgggccttgcgtttttcagaaagtgaattgccctcaaaccctcagttttcaccaagatgttgataaggaatgacaggttaaagtatttgctcagtactcaagtttgaaagtaaaaactagcgtaggacagaatgtaccaagttaaccaccagggaagtggatcctgtcctgttatccaggaccaggttttattaaatgattcatagaatcagatccatttattccaagtagactggaaatactcgtgtcctgatcctttttgtatggttgaaaccacttcattagacatgttgcaatagtaaaaagcccgattagcttagtgtttactcattttatttctcagttatttaatattttgttttccttaatatccatgatgtttgtctctggtgttctgatgtaaaatcatagtgtgtattttttacactaatgttgaaatctgaaatatatgcacccatctttaattttgcgtgatgtgttttacgtgctattcctttctcagtgacagaaatgaacagaccagaatttgtgggatttgggtacaggatctccataagctgagaatgcccctcttgctgttgctgccagactttcggaggctctgtggctgagccccagactccttactgtttggacactgacgtgggctctggcctctgcattttccagaaccccagagagacctggaaagtcatcctcagcctccattcctggtcacagatgataatgtagaactggccttaactgtctttcctgggctctggctttctgccaccttggactttgctactttctgtaggacttagtagcacctgccatactctgccactccctcccctctaggctgagccctgtctcacagactctgaacaatacgaggcttttgctgcccaaagtttgtcatgattgatttaaactagcatgccaaaaataaattcctaaaagtcagtaagtcaacttaataactgtgaagttcagttatcaaaaacttatattatttttagggacaaaatcttaataacctggaaagatagatttttttaaaattagtttttgttcttcagcttaactgacacgtaatttacaaaacataaattttaccttttataagtatgcagttctatgttttagtaaatgtacttttgcgactattactacaatctagttttagaacacatttgttacccaaaaaatctcctaaatacccatttgaggtccagctttaggcccaggcaaccactcttcttcctcctgtttctgtttttgcctttattagaaatttcacataaatgaattaatatgatgtataaattcttgagtatggcttttttcccttagtatagtcttttagatccatccgtattgctgcatgtatcaatatttagttcatagactgggcgcggtggatcacacctgtaatcccagcactttgggaggccaaggtgggtggatcattgaggtcaggagttcaagaccagcctggccaacatgatgaaaccccgtctctactaaaaatacaaaaattagccaggcatggtggcaggcacctgtaatcccagctacttgggaggctgaggcaggataattgtctgaacccaggaggcagaggttgtggtaagccaacatcacaccactgcacttcagcctaggtaacagagtgagatcctgtctcaaaaaaaaaaaaaaaaagaaaaaaaaaaagaaattagttcatttttactgctgtgggaattccattatatggagataccaattttatctattcaccatttgatgaacatttgggttgtttcccaggtttggctcttatgaataatgctgctatgaacacttgcatacaagacttggtgtaggtatatgtttccacttccatgggatacctaggcatggaattgccggtaataaatatgtttttttctaatgaaaagaaaatcaatgttatggcttttccaaagggcaaaactaggctgaacttccatgttacagagagaataaaactaaagaattagccataggcaaattgcactgataaattatctgaaaactaaaaggttaattataaaaataacagcaacatattttctagtctacagttgatccttaaatattagtaattatggccgggtgtggtggttcacgcctgtaatcccagcactttgggaagccgaggcaggtggataacctgaggtcaggagttcgcgaccagcctggccaacatggcgaaaccccatcgctactaaaaataaaataacataaaaattagccgggcatggtggcatgtgcctgtaatctcagctacttgggaggctgaggcaggagaatcacttgaacccaggaggcggaggttgcagtgagcggagattgcaccactgcacaccagcctgggcgacagaacgagactccgtctcaaagaaaaaaatatatatgtacatattagacaattatgatcaaaagctgtagacttctagaccagagtctagaagggtgtggccatgcttgccctgggcagccccatgacagctgatgtggaaagcgggaagaggctgacaatccttctccccagcatgtctgcatgaagccttgtgattcactttcaccaagtacctgatgtttcacaattccagcattcccgttaatgttacctcccattgatcctaaaaagaggcaaatatgaagatgtatataattttggataaatcaaaggtggttcctgaggaggaaagtgtccagaacctctgatctgcatagtattttacacacttccaagcataagaagatgaacagaatggcagaagtgagagtacccattttacagtgaggggcatcaaagaacaggaagtgcaacaaatgagggaggttcttgggctaccattcaaagctatccacttggaagtttctctgccagtttcatttccccatgttcctccagggggcgctgtttcctattctagctcctgctaaagccaggttccctttctgtaaactcacttggggaaactcaccaaggtactctccgaagctacaatcatgacagttacaaaacaccgctgttcggagattaggcctaggacatacgtggtcagatttttctctgttgaagagcaggtagagaatgggaaaacaagtgtacagaaatcaccaaaaatctcagagctgcgggaacagaaattttgtctgttttattaaatcataagttcaaaaacaatgcaaagcttccctccctagaagataattcctagtaaaaggctgctaaaacccacagggttttgttggtggtggtggtggtggtgttagtgatttgtttgaaatctggaacgccttgctttggtctttgtatggtttcaccatgattttacccatcctggagcctgccccagcaatacttgggacaagtcacactaactatgtatgtcttcctctgaaaggaatggtgacctgtggtgggcccagagcagccgttccagttacaaaggggtatcttcacctgcagtgaagaaagcaactctcagccacaggggtgttagccgaccttggcctgaatagaggctcctcagggctttggagggagttttagaaaaagaggcctctcagtgcctggcagagttgtgctcatcagcttcaacaaaacccatctaactaaatgcagggagcatttgtgagcaatttttctattcaatgattgctcaaagttgcagattattctccagatgatgttcttgcttgataagaacccagcaaacagtaaaatcaagatattcagaaaaagctttatatgtgtgtgtacgtgtatatacataccatataactcaggttggtttcagtaagcctacagctatagcttccgttcttggcaaagatatataaagtgtattctttgcttttatgtaatgcagcagggtttttcttcctttaaaagccttctgctccacacattgactgctttcttgcttcccatgttatcgtgtacacacttcactgacaaccttcagcctgtatcacctgagatatgtttctcctgcacaaagacacagcatcctgctgattctgtctttgtggtattaatggcagatggctttaaaaatgcttgtgggggtcaggtgcagtggctcacacctgtaatcccagcactttgggatgcagaggtgggatgctgaggtggatcacttgaggtcaggagttcaagaccagcttggccagcatggcgaaaccctgtctctactaaaaatactaaaaattagctggacatggtggcaggcacctgtaatcccagctacttgggaggctgaggcaggagaatcgcttgagcccaggaggcggaggttgcaatgagccaagatcgcaccactgcactccagcctgggtgacaattacttgtgggaatctgcatgtgaacgtacctggctgggaacaccctggcagatacagtcatttaatgccaggaataaagggcaggaaggtgtatagtgagagaatctgagaaatgggcaccaggtgtggaaagagctgtaatgtgaagtagaaatgggtaggcttgctttatgtctttaatttctttcttttttttttcttttttgagacagagtctcgctctgtctcccaggctggagtgcagtggcgcaatcctgcctcactgcaacctccgcctcccgggttcaagcaattctcctgcctcagcctacctggtagctaggactgcaggcgcacaccaccatgcccagctaatttttgtatttttagtagagacagggtttcaccatgttggacagggtggtctccatctcttgaccttgtgatccacccacctcggcctcccaaagtgtgggactacagacatgaaccaccatgcccagcctatgtctaatttctttttagcctgcttcctgctttttttttttttttgccacatgattctggagaatgccaaccgatatctacgagatctgtgaaactgagttatacatataagaactactttgtgaagaagatttaccaggacacatgcaaaggatttggtgcgagaaatttccattgtaatgctgtacatgctcaggttcagggacttctaagagggaaaaaaaggccacagagctgttgtccaatcaatagcctcattaccactcaaccaataactccattaacactaatgatggcttgtttccactcctggcaacaaggtctgtacttgtagaatgactaatggccacttcatacagaaatccacgccatctcctgttcaatgtgcatctgtgtcccaggcaggtgggatgttgttcatagtttatttttatacgctttgaatcatgtaaatctgggcctgatggtgaaaacttgtctgccaagggccagtatgtaacgacagtgatcgtgatgttaattgtggtggcccgtgttcatagcaccatcccacagggactcctcatccatcatttggctttaatgttcagccagtcctgctcatttgggaatcagcatgtcttcttgatgtaatggtaggtaagtttgattgtgaaaatgaggaacgggcgtgctcagtgcttgccgaggggctggcaccgagtctactaggtagaacaggggtttctacacctaaaacatgtcattgcggttcttttgctgtcttggcatatgattaattacttcacctttgtgtgttccttagtacttttcagtagacacaataatgccagctaccatcctgggatataatgctataaaaactaactatagttccttgaatgtttgtgtttaggaggtgatacaggctaaaaatgtgcttaagatcaagaagatcttagatgctatagtaaataataaagtatagaatttaatgatgagagtagaatattttggttttacacagcactttgaggttgataaatggacactaccaggctctctttcagaaggatacactgcatagagcatcatccctgtcatcatcaccatcaaataacacccctttgtagggcttaataatatatgatctgcaaagagctaataatctagtgataggaactctctggcccttaagaatgtacattctaaaatcaactaatcatttagtatatcctcttggtaaatgagaaaaatgtaaatttaagcaaacataattgtggagaagttggacctcttgtaggaagtcatttcaggatgctcttctcatttagttgagaatctcgatgtgttgggtgagcaaagagctgatttcactgaggacgccaagagcactgaatgtgccacataagagagggagaaacagaaagaggtaggctttaagggggtaaggtgaaaccagttgacaactgtgctgccagataagcagtaataatattacttttatttctattgtttaagtaacattggtataagtacctattttaccaatttaagaaagttagttcactatttcagtgttagaacaacatgtagtttataactaaaagcaccttgaaattagtatagatataaagattagatcaaaggggctggctgagcacacccacctacctctccttccctttgctttcattatttctttgcaactttcttcttgcccacctacccaggcaacaagtcctcctccttcccctaaaacactggggacaggagacagcaaacaagaacagcagctaccaacaagcgaacagggaatctcagacctaataatgagtgatgcgcaatcaagaaacatcagacacttgggggcaaagcagcacagtgaagcagaaagaacattccctagcaatagcagaagaatgtctttctgtgaaatttagatttgcaaaatctgaacaccttggaattgttgcaggtgaacatcatgccgtggccagggtagatgggccccgaacagaaataacacttctcaacaagcatgttgaacccgtatgggtccccactgaccaaaggccaaacttgagaggaagtgaccgaatacctttctagtaaagcaaattaatagcaatgctgttagtgccaggaaaagaaaaagggtcatcaattgaaggcaaattttaggtaatccctgcgaaacagaaaacagacagaatatgattaatgaagacaatgatagcctcaaacccagaaagggctgtggcagcaaaagagtggccactactctgggaatgttccaagttcggggacattggacacagggagcagcagggaacctgggaaacctgaaaagcgattgggtcgagaacgacattcagagttcccagttaggtctggccctttgccaagcttgtgccaagtaggtaacagcagaggtgtttgccctcagctcaaagtaatgagtggatgtgccccagggctggagattccacatagctcaaggggaacagggaggctgggcgcggtggctcacgcctctaatcccagcactttgggaggccaaggtgggtggatcatttgaggtcaggagcttgagaccagtctgaccaacatggtgaaactccacccctactaaaaatacaaaaattagctgaatgtggtggcacatgcctgtactcccagctacttgcgaggctgaggcaggagactcacttgaacccgggaggcggaggttgcagtgagccaagattgcaccactgcactctagcctggggaacagagcgagattctgtctcaaaaaaaaaagaaaagaaaagaaaaaaagaggaacagggagcctcggactcaggagatgagctgctacacaccttcctcccaaagagacatgcctcctccttcccctcaaacactggaggcagggcactgcaaagagacagcagttaatgacatgggagcagggaacctcaaacctcacaaccaaggagcatgagacacttgaggggaaacagcaccataaacaggggcagcaaggcccacaaggaacctacaggaggaaggaacctacaggaggaagcatcataaacagagcagacagaataggacaattacaagaagtatcactaaccatagttttcaaccaattttttaaattaatttatttattttttattatactttaagttctagggtacatgtgcacaacatgcaggtttgttacatatgtatacatgtgccatgttggtgtgctgcacccattaactcatcatttatattaggtatatctcctaatgctatccctccccctcctcccaccccacaacaggccccggtgtgtgatgttccccaccctgtgtccaagtgttctcattgattttgaaccagtttttgaaaaccagaaagatgaaattctcttgtccttcttttgtctcatttgagcacaggattatactgggctcctaatgagctggagctggttagcatcacctgcctgtccccccaccccttttttttctgtgccctggaacagtttgcataagctatgagttatttgttccttggaggttttagaaaatacaccccaaaccaccatatgggccttgaacctttggcagacagaatacctcttcaaatgttatttcatttttttctatggttgttggtttgcataagctttctactccactttggaccaactttggaacttttataatcctgtgagttgcctatgtcatctaagcttgcaaattcaatgaagtaaagaaatattaatttctaattttaaaaaactcttttgtatctgtagttaagcctcctttcattgcttctgtttttcattactgtcttctttctggtttttgtcttaattatacttctaaatatttgtctatgatgttggtcttctcaaatgttggtcttatgatgttggtcttttgaattatttttatttttttgagacggagtctcacttcgtcactcagcctggaatgctgtagcataatttcggctcactgcaacctccacctcccgggttcaagcaattcccctgcttcagcctcctgagtagctgggactacaggtgcccgccaccatgcccggctaatttttgtatttttagtagagacagggtttcatcatgttggccaggctggtcttgaactcctgacctcatgtgatctgcccgccttggcctcccaaagtgttgggattacaggcattagccaccgcgcccagcgctttcgacttttattagtcaaatctactgttttattttattttctattattaatttttgttcattcctttatgattactttagtccactttctttaagtttattttcttgctttttttttctttttttttccctgagagaaattttaaaatttttaaaattttcttcaaggctctaatttttctctcagcacagtctttgagttgtaggtctttttgctgtctagtcctaaagaattttgactttgacattctttttagatgtatttttaaaaatacctttaacataaatatgtatagttgctagaaattcgtattttgtttgcttgttaagtccttttaatgattaccatatcactaaactgtggtagtgaattcagactgtagacaaaatttttaattttttgttgagcgttccttcgtggattagggaaatgtcaaattgtttgaaaagtgcttttgtgaaaataattttataatatctctattacagagatatatttcatatatcatacaatttatcaatttaaatggttttgagtataattggtatgtgcacctgtctacctagtcaattttagaacatttctatcaagccaaaaagaagcaccatactctttcactattatcctctgtttcttccccaccttttccctcaccgagaaatgactaatttactttctgtctctatagatttgcttattctggacattttatataaataagatcatataacgtgatattttatgtctggcttttatgactaagtgtaagtgttcaaagtgttcatccatgttgtagcatgtagcaatcaacatcaaatagaagtggtaagatacgacattccttccttgttcctgattttagggagacagcatccagtctttcaccataaagtatgatgttaattacgaactttttgtagatgccctttgtcagatggaggaagttccatagctagtttgtttagtgctttttatcataagatgctgtcagattttatcacatgatttctctgcatcaattgagataatcaatggttttctcctttcttctactaatttggcatattaatttaatggatgttccagtgtttaaaaaaacactgtgtgcctgcgaaaattcccccttggtgatgatatataatcctttttatacaactctggattcagtttttcaatattttgttgaggatttttatgtctatattcataagaaatagtggtctatcaatttctcatgatgtctttggttttggtatcacggaagcaattgcctcatagaatgagttgggaagtgttttccctttttctaaatgttttggaagagtttgttaataattggaattaattcttctttaaatgtttggttaaattcactagtgaatccatctggtcctgtggttatctttgtagagagttctttattactaattcaacctcttttctattggtctgttcagattgtctatttgttatcagtttttgtagtttatgagtttataatgaatttgtccatttcatctaaattatccatttattgacacacaaattatatttctttataatcttttctatttctgtgatgtccttttttatttctgagtctagtattttttgtcttccttcttttttttcttggcaattctagttaaagctttgacaactttgttcatactaacttcattccagtgagatataaaaatgtcactgctatagctctattcacttcctcactttctggggcattatttttatacataaactaatgttaaacatgtaacactacattttaataattattatttttataattttatgtattttaaaggagctgttatgggttgaattatgttcccccaaaagatatgtactaagcctcagaacctcagaatatgaccttatttggaaatgggcttattgtaaacatagttagttaagatgagataattttggagtagggtaggcccttaacccaatatgagtcgtgtctttacaagaagaggagtgagaaagacataaaaaggagaatgccatgtgaagacacagagacacacaaggagaagaaaagcacagggaaggcagactggagtgatgcatctacctggtaaggaatgtcaaagattgctgaacaccagaagctaagagagaagcatggaacagattgtcccccagaaacctgcaggaggactcaaccttgctaccaccttgatttcagacttgtagcctccagagctgtgagaggattagcttacattgtttcaagccacttagttttgtgataatttgttgtggcaaccccagaaaactaatacagaagttaaggaaggaaagaaaaaaagtaagtatatatgtgtagcttttgttatttcagtcttcttatttattatgtctggctctctttatttgcctggatttgagttgctagctggagtcattttctcagccaaatacactttttctctcatccacttgtgctgttattggcatatatttctatatattatagacccctcataacacatcatatacatatacacacatgtatataatttctaacttatgtatataatttatatcatatatacacacatatatagttttatacaattactttgtaaaacagttaagggaataaaagagaagaaatatgcatttatactgtatgttataattacatgattatgtttcctggtggtctgtgctttatcatggggattgaagttactgtctgggataatttgttttcagcctgaagaatttctttagtgttttctgtaaggcagctctgccaataacaaatactctccttttttgcttatctatgagatatttgcctgcattttcaaaaaaaaaaagctctatttgcctgcatttttgaaaaatagctttgctgaatatagggttttttgttgacagttttttttttttttttttttttgcttactttgagcactttgactatattatcctaatgccttctggctctcattgtttgtactgaagtcagtggataatcttataagagtttccttgtgagtttccttgaaggttcccactcagaagctggacgtcctgcttgagatattcttgaaagaatatctcaaatggaaaacttaatattttacagtgcttaaattgttatctatagagcagttaaggggaacgataatcttataacaggatctgcatgattcttggacagtgattgtttttttttttttctggctgctttcaagatgttctcactgtctttggctttcagcatttttatggtgatgtatctatttgtgaatatctttgcatttatcctatttgaggtccatcgagcttcctagttgtgtagattaatgatttttcatcaaatttgggga

SEQ ID NO: 8 - DNA, 45770 bp, Homo sapiens
  allele (1)..(45770): CHST10 Variant Allele (rs7585898)
tgaggcggtgccggcgttctggcccccaaagccggtctagcgcgccgggcgtcttccttacttccgctgccgccgccgccacatcccgggacccgacgggccgcggcgcggaggcctcggggcaaggtggggcgggcctcccgagctcccaggaccccgcgcgcttcgcccacaggcccggcgaagcccgacccgcgcggcgcccccagggccaggggaggagcctaaggacccggacgagcgccgctccagtagggtgagctcggggacgcgcaggcgggtgggtttcagcgcctgggcccctctccccgccgcggggcgcacggaaaaaccggggaacccgcgggttttgtcctggcgagccacatcccggtgtgttttggcgacttgaagacctccctagttcgcgggagtagcgggaagagccttcctcgcgttaattatgcaataagaaggcgtccttgtgcgggatgctgtgacccgcggaattattgatattgtgcgagcctacaatttacttctttcatccttggctgagaatttgcgtttgtaattgtagatggagagaggaagaaagggttcagcttgggtccaaggagcatgcagaggaaggcagggaagaaggagcatgtgcagcttcggtgcgaggggagtcaggggtgggaatgcacgttccctgcctgaggggccccggggtgccctgagcctctgatcttcgctgtcaggaggcctgtccgaagttggaggttgaggcatgcagttctgcacttctggctgggaaggtgaaccaggttttccaaaatgtcatttttgctttccaagtctgcaaggcaggaaagggttgggcagtgaatggaaagtagtgcagccaggttctggttagctcagcggcaggactgtcataacggtgggtttttgttgttgttgttgttgttgttgttttgtctgaaaaccagagtctggggctttgggccatgaggagttgggttattgcattgcttagagtgccagagtgagaaatgtctcagacgctgttaaaattaggcagctcagtttagctctggctctctgataaccaaccacctcctccttcactcttttcagtgactgggttaaaatgaaaagacacaaagagagaagtggtcttttcccttccctccccattataattaagagcttagtccatcttggctcagaattggaattcagaattcagaattgctcttgaccctgaagaatagaatctcaaagaaatacctgagcagaaaattctcttcttcgctgaaatgaaaattggagtgtttgcaaaactgaacaaagaaaggaaagaatttgtaaacatcacaggcaacttgcagttatattcggatcatttttcagtgtttgaggagttcatacaataaaaaggtgagagagagccaggaatagaaacaggggagagaggtggttgcaggaccttagagattgcagaaacccaggagttcattttcttttcatacacttctggataacctggatgtgaggaccatcaaatgccgtacatgatgtttctaacaatgatggaccacatatacaacagtggtcccataagactatactaccttatttttactctaccttttctaattttagatacacaaatacttaccattgtattacagatgcttacagtattcagtacagtaacagcagtacaagttagtagcccgggagcaatagatgattccatatagcctaggtgtgtggtcagctgtaccatatagcctaggtgtgtggttagctgtactatctaggtttatgtaagaacgctctgatgtttgcagaagaacatcgcctaacgatacatttctcagaaggtatccctattgttaagtgatgaatgactgtatataaagcttaatctttcaatcaacataataggaaattgcttttaattttagcattgagttcttagagtaaagggaggcagagagagaccgtgctgcatgtgtcccagtcagcttgggctttattgtatgttaaatgagttgtatgtttattttggtagatctcctaaatccatgatctaattccatgactttggcttgtttctggttttttatgatatggcatttggctaaaattttccaggtgctaaaggtgtaaggagtacgaaaatccagagaacattttgcattggaagaattgatcatcttgtataggaatcctataactatttcaaacatacgaaacaggcataattggatttgattatttttgctacaaaaaatgtttcatttttcacactaagttacatggaagagtcttttaaacagctagtggttttggtacatttagaatattcatttaccaagaaatccaaatataacctgcctttgtaagagacccattctgccaaatatatttgaatcatcaaaatggttcactatttccttcctaagtataaaccaagttgtattaagtaagttgatcttgtaacttttaataatgcttttttttttttaattttcctatccagtgacaagaggaaccaagaacctcagttcaggggaaacacagcaaggaaatgtgagccccaggctgcagaaggtacgtgaaggagaatgtgagctcatcagttatttgagcatgccattcagtattgttcctgccttttttcttgcctgtgcagattgtaaactcttgattaggagtatgtaaatgtgtgcttagaaacgtttccttaaatataataataggagcatgctctgaggctgggattatgtgagttagtacctgctgagacctgtgcttggtacagagtgaaccccatacaggtgtttactgtatattattattattgttcatgaaaacctgtcttaactacaggtgtatttctcactggacagttaagagtgttttcattctcctaactaagggtggttaatcgttccaaggcggtaaattgtaaggatgacaacagagaagacaaaggaaatttctgtacgcagattgagagaaacctttactatgaatttgaaagtctcagtgacatgcaatagaactttatagtataaattcatatgccacactttgcattatggagttgtaatttaatgattctattgatagggtaatgcattgtagttcagaatgtgctcagggttgatggtgaaatgtccccgtttctgcagccctggtctgtctagttctcatctcacctgtcatcctcctggggttaccagttccttgtacattaccaggtttttgtgtgtgtgtgtgtgtgtgaagtttcctttagagtctggctgtgttttaaaagttgagccctggacatgtgatccctggtatgtgtatgaggtgaggttgtcagtaaagggccattgacaggcctcctcatctgacccacccctgtccctgcttgcccactctgcatgaggaacactggccttcttgccacttttggaattctgggacccagaccacagtctttgcccaggggtctgcatggcttgctcccacaatctgtcctgccttttctcaacatcctgcccatgcccttgtttattagccactgcacctgtcacctggcttgatcatatacattgatcacttgatttgtttatggcccgtctatgtctgttagtaggaagcactgtgagagcagggaatgtgtgttgctatatccccagggcctagaacagccccggctcagaggagggctttggtaaatattgctgaatgaaaaaatgtctggaaaaagcctggttaagcagagttaagtgggcttatttaccatgggacttttcagaaactttagtaagtgaatgcgcatattaaaagtggggcctggcaggtgggaggcaaactcatcagcagagtaagaaaggcgctgtgcttctggatgacaactcagacatggggaaaagctgctggcgggaatggtattggcagctgagcaaaatgaatttacaagtttccttttcaaaatgcaggggaggaaggatttgcatcaagagatggtaatagtaacatttccattgttagttattacaaacatgtacaatgtgtgctatttatcttttatttaaggtggggaagggggaagattagggcttcttgtagattcttccttccctgaccctgctttccccataaggccttaagttcttcagctgccagttcatccttgtgggttgaactgaggaaccaaaccctctggcttggtttcagatcctgacatcttgacttgtgaaaatcccatttaatgactggaagtaggaaagctctgaagatggatatgcagattctaggggtcaggaggctctgttcagggcctgcgccatgaccgaagggagggcgtgtaggggctcaggttctgctcccaccattagctctagaggcactctgagagttgtcttggctccttgaacaaaggggagttaattacagaaaatgccaggctttttaaaggccatttgtcccctagctgtagggagagcagcagcccttggcagagccctgaggaaagactctttatgtcaggccgcagtcctcttgtagacagaaataatgagccttggtggtgtcatcctcagataggaggcaaaccccatggtgaaattctgtattcaaggaaacaatgcagagaatggggcggacttagaggagctggggtgaagtgaatttggaatgcctctcttttaaaaaaaaatggggcagagttttgtgttgttttccaaagtcagacaaagcctgattctacagagtctagttaaccgtagatgggagggctgtaaaggagagtaagatgaaggcagtgatggaaggtcttagattctaattaaacctcttttagctgtgtatttggaacacttgtaattcagagcatcaatagactctcgttgactagatgcttttttgctgccaattttccttcttaagatggaaggaggtggtgggagaatggcgtttatgccagaatgcctagagtctgcattttaacaagatccccagggggattcatgtaggcattaaaatttaagaaggggtgaggtcctggaccagcaattctcagtcccagctgctcattagagtcacgaacagagctcttaaaaaatgcctgggtactgcctccagagatttgtgttgtcttggctggggtattcttggggcccggggtatcactgtatttcttggaagtttcccaggtaccgccccagacataaagccagacaccttcaggtagatgtctagattcagaaggcacataatcccgaagcaaatgacaccatgcttagctgggcacaccactctttaggattcatcaaaacccaccacaccagataatgtggatcctcgtagctcatccgctggcttctagagccacagccagagatgatgggatgtggagcacccaaccggggttgcttgtgccgggttagaattctccctcctccatgaatgaaaatgaccttgagactgggcagtggctgagtgggcatttgctttttgtacctctgactctgctgctgaagaaactgtttcaaaatttaaatcagatcatgacatcaccacccctcttttcatgtaaaactctcttcaggggctcccattgcttgcaaagaaaagaccataatagccctggcaggccccatgttgtctggcctgcatctgcctcagcctgtgccccagaactccagccacatgggcctgcgtttagttactcaggggcccattcccttggcctggaaccctgcccttcaccttaggtaactgtgctgtcccagaccactctgcccaaggcacatcccattgtattttctccccacagcaccatgtccctctcacaccatcaagtaccactcctcagatagcttctttccttcgtgtgggcctgttagacgacaagctctgtaaggacaagaactgtgtgtgtttagttagggactcagggtcatatccttggcagctgttttactgcatgaatgaatacactggatactggataatgaataatgagcttgaagtcattatttttaggttattttgtccttaaacttgtatgcacatacacacctactcatgtttgagtgctgtattttgtaaactgtagagatattggacctgagggaagtgggtattttgagagagtactgggctgtagtcttactggttctgattggctcatgtaggatgtgacttgtagaacaagtcccagttttctaaatttttaactaggccgggtgtggtggctcacgcctataatcccagcactttgagagtccaaggcaggtggatcacttgaggtcaggagttcaagaccagcctggccaacatggtgaaaccccatctctactaaaaatataaaaattttccaggtgtggcgtgcctgtaatcacagccactcaggaggctgaggcaggagaatcgcttgaacccaggaggtgcaggatgcagtgagccaagattgcaccactgcactccagccggggtgacagagagacacactgcctcaaaaaaaaaaaaaaaaaagaaaaaatgcttattacaaatatttaaaatatgaattgtataaagtacaaaaagagctcttactgtcctctcatgattttattctatgtattacatatatgtgtctatgtttgtatatgtgtgtaatcatatatatttcacacatacatgatttttttaacaaatgggatcatacattccatcctgcaacttgtcttttttgtttactggtatatcttgacactttggatatggatctatgtcattggcttgcctttcatcatagagttttatttgaaatgaaaatgtttttggacttcggcatgatttcctaaaccccccaatcaatgtgttttaagtagtaagtgtatttgaatgcatatacatgctgtggcttagatcattttgttttcaaataatactgaagtcctcatagcatttggttgttttctagtctcagttaatggatattaaacatagaactgctctgtggagactagagaaatattttgaggttgaaagggggcctcattcttgaaaaagcctggagaccctcagggagagggttgggcaggctgcctcctgaagtacctttccacattcctgagttctagtaagttgctcaattgacacagtcattcagcaaatagcaattgttggctcatggtgcgccaggcactgtgctggtccctgctgtcctgaccagcatgagcccatattctgcaaggagagcaaatggcacatagcgagagcatctggactgtgctgggtgtagtggaggaagtggagcaaggtcaggtggcgcagagcggtgctgggggtgccacctgggtggtgatgaggcagagctgactcttcctctgctgcccatgggaaagggagcaggccctgcttaccccgagtgtacaagaagcccagtggccgggagcagctcctcagagagctccctcctggaccccgcagtgactgcccacaggctctgtggcctgcaaggggctctacagccagatatgggcatgctggcaggcagctgtgcttgaaatgctgataggggcctggggtgtaatgctcttctcaagagagtggttttggcagggctagggttttgcccctgaagctttgcaaatccacatcccccactggagtctccacgtgtcctggtaccatcccggggacaagaagcagggaaaaagcaggggaaggaggtgggaaccctgcagtccacccttctcctatcctaatggagtggccagggaagggactctctgtatatcttagtttagtaagagtttgcagaagtcaagttaaaaatggattttttgaaaatgaaatacccatgtgaaagaacacattggatgatacatggtcagttgcatgattgttgagaaggtcttctgactgatgagtgtgcaggtagctgtttgttcctgtggatgaaaaatgggagcccgaagagctcttcattgacacacccacagccacctagctagggagagggtgagtgtagaccagtccctgacctcctgcccgggtgaaagactagctacggagacggtgagtgcagaccagtccctgaccccagcccaggtgaaagactagctagggagagggtgagtgtagaccagcccctgaccccccgcccagctgaaagaagctaagagctcctgacttttaaatgaaaatccaatacttaggaaggcacatatggcttcaggagagtgcacctctcagttttcaactcatgtagttggagaaatcctatccctaggccacctggcttcctggagaacagaagaggtgctattcattttcaggtaaggcttcattatcttcccactttacctgcagatgagctcagtgggcgaaatcatattacattccttcagaagactagttccattggaaagatttgattcttaaactataaaaacctccaaagtgctgtcctgaggccgggcgagggtgatcaggggttggaagcctggagggaatgagcagagcaggcagtggaatatgcagttcccaggtcctcccgccacatgctctgcagagtcagcgcgtcacctgcaggagggaggcagtgcctcttatcgttgttccctttttcatagcactgatcctaggagagggtgggttgcaagccccaggacactcagagccaggacctgtctgtttagaattgcatgcaacctgcgtggtacatcctgttccttttactccctccccaacccaccctggtgcctctgctgcttggttagaaatggcctgcagctggcatttttcaggggggtgctctcactgtgacccatgaggatggacccccctgagtgcactgtcttagagggctgagctcagtggacttggtactgctgggccctgcatcctctggccacagtctaagcctcagtttcttgaagggaagttagcagttgctggaataagagtgtgtcttgtttttttctctcttcttggtgtagaccctactgtcgcattaatttctggcaaccacactgagaaaggtgtagattaagctggaaaatcacgaagagtgccaagggattggtcagtttttactgggggtctgcaccaggccaggtgggtgctggttttttgtctacattgtctcatttaatcctcatggccactctgaggtagtggtaggaggagggccttctattagagatgggacattgaggcttagagaggttaagtgacttatggagtcacagagctaatgggtgtgagcagggatttgaaccaagtctggggttctttgtgcctcactatctctgacatggagtggcggaaggaggaggggattgtgggatggagacaggagacaggacagctggcttgcaaggaatttggcatgcccctgctgggtggtgttgctgataaactacagtacactcggttaaatgtgaagttcagaaaacaacacataggtttttgtttttgtttttttttagtataagtatatgtaatatttgggacatactttatactaaaaaaattaactgaaattaaatctaactgggtatcctgtgtttttatttgttcaacccgacttggggaacctgggaaggacactgggcctcatatctgggcacaaaaaatactggttttgggggggagtataagtatgtcttatgcaatatttgggttatacttacactaaaattttatgttatctgaaattcaatcttaacttgggggatgtcctgtatttttatttgtctaatcaggcaaccctattggtgaccccaggaaacacacgaagccttatacacgggcacctgagggtggtttgcgagccatccggagaaaacccaggcagcttggcaggtggtgagctccccactgcaggctgtattcaggtgtggccggataactacgtggtgggtgtgtcatggatcctatttgcattccagatgcctggttcctgtgagattctaggatgtaaatgttgagacaaggagagtgattcacctgggtcttcatggagctctgacccacccagggttaggaggctctctctgaaattatttgccatcagcactgtgttgaggggaccacttctccctgccatgcagaagtgatggatggcctcagtcagtcggtggaagccagctcagcccagggtcttgtctgtacgtggagagctttggcttgaagaagcactgtgttaaaggtgaaatgaaacacactttcttgtgtcacctgccaagaactgacagtgacttcccagttctttatgtgcctcctgcaggagagtgtggcttctgtgccaggctgaggaccgacatgccccgtgttgctccctggctgtgacagcatgaaaaacacccacctcagtgttctacccaggccgctgctggcaagtgggcggaggcgagaagcgtcagtgttcattcctttgcttttttagagcttctctaggtgtggctacatcttgtcagccagtcagaattttaaacacagccagctcctaattgccccagcatggcttctgcccactatgaatgaccctcagctaaggcctagtccttggcaggcctcttcctgccacctgcttccagaccatcgtgggagctcactgggaccttagcctgggcccaacaggagtcagggatcaaatgtgcaaaggagtcttattctgtgttctgagaacacaaggaagtggtcttctctcattatcatgtctctccattagggtgttctaaatttgattttattattgaatcaatcatttatattattaattcaatatgaaatgttaaatgccaagtcaaactacctattgtagcagtggaaaaaaacggaaatatttgtgctgatacttactgactgaaatcacctgtcgttttcattcctctttgttgacttgatgtatttgtaagcagcaggggcatctcgcttgtgttttccaggaagagtcagtgaatggctgcggtgtgacaacatgcaccaccagtggcttctgctggccgcatgcttttgggtgattttcatgttcatggtggctagcaagttcatcacgttgacctttaaagacccagatggtacgtatgcttcatggtggaacgaattttggctaatttagacctagctgcaacactgttcctaggtacatgcatagatgacttctgtcacagagtcaaaggactttcatgccagcagggaccttggaggtcatggcctccgttccttcatgttacagaggtgtgaggggaggtagggtgggaggggctggagggtcttttcaagcatctcctctggaggaaggaagctgctctttgtggctgaggcctgggtggtgcctaggagcaaggagcagggtctcctcccagcagcacagtggccttatgccttgcagcagggcgcctctcaggctcgcagttgggaattctctttgcctcatgtcatcatgagaggtgcagcctcaactgcttggcatgcccgtgtggtggccacatgtttgaaggtcaccctccatgcagcggaggagggtcatttaaatgtatgtcttcaggttgtcttggaggctttcttagctctcctttactgaacgtaggcattcagatgaggacggataaagagcgccaaattgggtctcagaatgctgattctacttcgtgctcttgtcatttgcttatctacatcacaatgtttcttccaccaaatggacaccctgcctgctccggcaccgcccatgattgccctgagcatggtgaggtgctctgtggtctgtggagtgctggatatgtccaaagaggtgtgtgatatgctctccagccccgaggccacttcattgagtggccaagcaggcaagcacgaggaagccagacacatggagtcattgaagtcctcatttgtgccgtggattggcccattcctttaggctgattgggagatactggggaacgtggatgagcacagcactttgctgtgctctgcaccgtactttgtcctcctgccgatggtggccttggaaaggggcagttagagatgcctctgtgccagcagttcttcctggaggctgcactgacctgtgctgtctgtgtgggacaggcccctgctccacctcacagagctcccaggcatgtccctggctgtgtcaaggactgcccgatgtcctacacctcctgccccatcctctctctgccccaccttgtctgcagagggacagcaaggttagaagggaggtctgcagggaaaagagggacaccctgaaattagcccacatggtggttctccccatgacagttgttgggccctgattggctgtcatcacatgtcctgcctcatcctccaggagccctggagagaaacctgtgaggtctgcacagcctcgggaggtgatattacacctgcaggtatctgggcaggtgtcactgagcatgacagctcacgcccgggactcggggttccgtcagcagagcaagggtcgattcttggagggttgctggaatgtgacacgatgatctcagtttgacagtttggacatttccatggcagcttcagcacagtgccatgccactgagagatccctcctgaagccctagagccgggttctcatccccgcagcacttcagaatcacctgtgggactttacagacctgctgctgcttgagacccagtgaaggagaatcactaggggtggggcccagttgagaagcacagtggtagatcctagctggagaactgaagagaaacagagctgctgagaataagaaataggtgttactcaggattctcctaaatgtcacctcctggtatggaaggcactcaaaaggcaggtcatgaggttaaattgtttatggtttattttgcttaaaaaagtaggagtagatgtaatacattttagtgagacttctataggtaatagttaaataagacttgtgcctttgtgttttactgttatctggcagaatggcctctaaagaatgccttgtttcccagcggcatctggtaaatgaggtctcattctcctttgatgtatcaagttttgtgctgaatgttttcagtgtagacactgatcctggaagctaagcaggggtaggcccggttagaaaaaaagcaagtgtaggcgcagaacagggttttgtgaagcggagaaaaggagtggtaaggagtgttaggagataaaacctatgaagaaagatgaagggctttcggattttacacctggagaggagcaccgcagcggtccttaatactgcctgtgagatctttccagccggctgccttcaggcgagtgaaagggggcactttccctgccctgtgagatctggtgtggtgtgtgggtgctgggtcactgagatgggagtgctgcccctgaccccgaggcaggggctgctggtggtgaggatgctgttggccgcacagtgtgcagtgaactcagtgagaatcttctgttgtgggcccactcccgttgcggggtgaccaccacagcactacccagcctgcctcactcgcgtgagatgttacctaattgtcccaagggacctggttaggttaggatcctgaaggtggatatccgccagctgagttctggatgcaggatgcgagctggcacccagcatcttgccagtgcacaaggacgctgggctgaagcatcaagagcatttacactcagagcctgcccctgcaggcgtcagagaggccctgggctggggtggtgtaggcctctcccctggagcctgcccttccagcactgtgctttagagagtgtgtcccggagcctggatcttgggcagcacaggaacccctctaagctcgtggccataaagggcttctcacatgttggagtttatttcacacacgttcacggtgtttttgattatgaaccagaagcccattgtgaagtgtcaagaccaggaaataacagacacggcagtgtccacggtggggagttccatttcctggaaagtgcgtggagaagccttggcctcagtgctcccgggctgctcctttcagctctgtcctctgggacagggccagcctcagaacccccatcagtggtgtgcatgttcttctcacctacctgcctttcccggtttctcctgccactggagcccctaggaagagcatggttgtcgtgagttgctgtttaaagcaacacttactttttttagtgttacagtttctgttcagctcagcagtggagccagtgatatttgtggcaatgatttatcctcagttagcaaatttcagtatcatattgaactaggatcaggtgttgtaactagactttctcataagaaaataaatccccctcagcgaagggaatgtgatggaatcatatggcaagactcaaaatgatgcccttgtggacctggtttgtgtttgtaggcgctggtttttcctctcctggttgacttcctcattggttctgagccgcttgagggcagagcctgtgatgtgaaggtctctgcagccttgaccatctttgcatgtacttatttgccatctgcggatactctccagtgaaatgtctgggtgtatcgtacctattttctaattagattggttggttttttaattgttgagtttgaggattctttatatattttagataggagtccttggtcagataagtggttcataaatattttttccctatctggagcttgtcttttcctcctcttcaaatgggctttcacagtgtagattttctctttggttgttttttaaaaagattgatggttttatgtttcacattcaggtctgtgatccactttgagttcattgttgaataaggggtgaggtttggatcaaggtttgttccgtgtgtgaatgtccaggtgccccagcaccatttgttggacagactgccctcctccgctgaatggcttttatggctttgtcaaaaggcatttgggcatctttgagagcttctatttctggggcctctgttctgtcccatccacctgtgtgccttttccttttagagaagacattcaacctctctgtcttccagtgtacagtgccaaacaggagtttctgttcctgacaaccatgccggaagtgaggaagttgccagaagagaagcacattcctgaggaactgaaggtgggcacagccaggccgtggtccttgtcctcttgaacacggcacccttgtcgcggggagctggccttcccctgtggctggttccgcttgtcatcacgtctgcgttagagccttttcctgtgttacttctccatgttagttcaccttgttaatttccatttgggagaggcacaggtcacgtctatttttgtgcccctcacagagctctgtgcatcagggctgctctgtcactgttggttgtgcagcattcctgaccagctgaacatgagccttgcctggggagccgagagtattgggcagggtcaggaggaaaccagaagtgggagaagacatctcacccagtcatggggttttagagtgaaagggggccctggacagcagaacaactaattcagcctccaaattgtatggatgagagaactgagcctagaaaaaaggtggatcctccacagtcccatggagttcctggcggagcccaaggctgctgacttccacccagcccttgctggcttgacattctggctccatggctctctgcaggcttcttgtgcacctaaattcctgatcattccctagctgggatgaggggtgcactctggaaggcctctcacttcgtaacccccattctggatctagagggttgaagttgcaattgttccagaaggaatgaaatgggtacagcgagccctaaaaatatttttagcccagaatcaagccgtagaggttgggacagctcctatccatgggtcacagtgtaaggatgataaattagaactcaataaacatagaaaacatacaccagtcagtagagtgctgctggaggttacttctcgtaggacattgatggaatggaggccaagtttacagaactctgagacagcctaaatgttgcttttaggttgaggcatcccagggtaagaaaataatttggatggggtacagaaacgaaaccaaaaaatcttatgggaaataggagagtggctttaataggatggatttaataggaaatcaaagttacatggataaaaacaaaggtagggtaagcctttggcaaagtgtcgcaacaaggttccctcaaggatgccataccctgtgaggaagagggtggtcatcttggtgctccctctccgggtggagggtgctcccggagagattgccagcctgcaggagtcattgcaaataaaaagactgcgcctgaatgtgctttacagtttgcagtgtactttactgggtttcaatctcattggtcttccgagccgccctctgaggtatatttttattctgtttgcatttgggaaacatgaggctcaaggaactgtgctcactgggtcagtatcccctggacagcaagttgtgggcctgggctttgaactcagtgtcctctgtgcccctctcttacccgctgccccagtcattctcatgagactcagatgggaggtgagggaagtgggggatgtcagaggtgatgtccgctgaggccacatgccgttaggtgacaccaaaactcagcatgtgtcttctcacaagaaaggggatttatcaacatgatcagattctgtagctcacctttaaaagtttattttggccaggtgcggtgcctcactcctgttatcccagcactttgggaggccgaggcgggcagatcacctgaggtcaggagttcaagaccagcctggctaacatggtgaaaccccatttctactaaaaaatacaaaaaaatagccaggtgtggtggcatgtgcctgtaatcccagctactcgggaggctgaggcaggagaatctcttgaacccaggaagcggaggttgcagtgagctgagatcgtgccattgcactccagcttgggcaacaagagcgaaactcggtctcagaaaaaaagtttactttgtgcatggtgtagccgaatgtttgaatggaaaatagaaaataatatttgtctttaagttggctttgtatatttccaaagggaaaaaagaaaacaatgctcattcttacacacaattgaacaagaaatcttttttctttagctgggcatggtggcttacgcctataatcccagcactttgggaggctaaggcaggagaatcgattgcgcctaggagtttgagaccagcctgggcaatatactgagacctcatctctacacaaaatacaaaaatcaggtggttatggtggtgtgtgtttataaccccagctacttgggaggctgaggtgggagaatcacttgagcccaggagttggaggctatagtgagtcatgattgtgccactgcactccagcctgggtgacagaacaagacctcgtctcttagaagaagaatttttgtctctaatgctttgctaaaagaaaagcaatatctaatatcttttctttgttcaaagaaaagcagtatctaaaagtgcagagttttctgcattttctaaagggaacttgttgggaggtgctctctcctgatgcgctgttcttgagtgccatccatgatcagggttaggtttggaacagagagggaggagaagacagagaggctcttttgggataagtgagcaagaggtgggatggatgaggaaatgaggttaaacgagacccgttcttgtaagagcaaggagagtgcctggcgtggctcctggttttccatggtgggtggagggcccgggcagccgctgatgccctgtggggaggaacggaggccactctgcaaaggggcctctcgcttccccagtgtcttcatctcgaaaagcaggcagtcagtagcccccaggatgctcttcccaccaccagggaatcccaggaaattcacttaaacacacaagggagaaagcatcctggccagaggtcatgagtgtaagagagtttggttacagtagatccataaaggaagagctgggtggggggccctgaggggggacctctgtcatcctgatagttccagcgtcccggttctagtgtgttctagaagtcttatgtccttcccattttctaactgacgttgtcccctgggaggacaggttgttaaaactaccctataaatggatttcctggcaagcccagtgcattttaaaagatataacaaggatatttgggtccattcaatacaattatttggaaggatcatctgctttgaaattttgggaagttctgtgtagctttaagagatagatatggccgggcgtggtggcttacgcctgtaatcccagcactttgggaggccgaggtggcggatcacaaggtcaggagatcaagaccatcctggctaacacagtgaaaccccgtctctactaaaaatacaacaaaaaattagccaggcatggtggtgggcacctatagtcccagctactcgagaggctgaggcaggagaatggcgggaacccgggaggcggagcttgcagtgagctgagatcgtgccactgcactccagcctgggccacagaacgagactccgtctcataaaaaaaaaaaaaaaaagagagagagagagatgtagcagctgaagccttaaaaatgctgagaaacagggccacaactagagggggccgatggggttggtggaggctgccctgctattcaggaatgccctcaggatgcctccagagaacaaggaggtgtgagcagcaaggggactttaactcaccgaggacagggggcctctgagcaacttctgtgtgtactggcacatctccctgtgccccctccaacccatgcacacacaaggcctctcacattacaggtattctcttaggttctaaaacagccctgaaaagaatggaccagcatgtagaatttgagctttttcatctttttccccctagctagaggattccaaacttcttactttggtttttaatttcttttttcccccaagacggagtcttgcttgctctgtcgcccaggctggagtgcagtagtgcgatcttaggctcactgcaacctccacctcctgggttcaggtgattctcctgcctgagcctcctaagtagctgggattacaggtgtgcaccaccacacccagctaatttttgtatttttagtagagatggggttttactatcttggccaggctgatctcgaactcctgaccttgggatctgcccaccttggcctcccaaagtgctgggattacagacatgagccactgtgcccggccttattttgttttttaaagtcaaacttctctccaaagatctgaggaaccaagcttgcattcattttccttgcccagcctgccgatcgggctggtggagaggctctgaaggcctcatgaaggggctggggatagtgggtgtcactctgtagacagacaaggaagggaagaagagaaggctccagatggaaaggaggggatagaccagcaggagcggctctgcttggcccggtcctgcctcctttaatggtccctgggcctcttctgctctgtgtcacctgcagccaactgggaaggagcttccagacagccagctcgttcagcccctggtctacatggagcgcctggaactcatcagaaacgtctgcagggatgatgccctgaagaatctctcgcacactcctgtctccaagtttgtcctggaccgaatatttgtctgtgacaagcacaagattcttttctgccagactcccaaagtgggcaacacccagtggaagaaagtgctgattgttctaaatggtgtgtgtgggtctactgaatgtccactgggaagggtcttggtggccggtgctgaggaggctggggaggacagcaaggaggagtcacaagagggctggtttgacctgaagggactggtggccgtccagacaggcctgtttttgttgtttcctgttagtgttgtgccttacaagttagtggggctcgtttagacaccgattcttttcaaaggggcacagccacagtccagctctcctcacctgtcacagcagatcctcactttaggtggctcgcccacccccaggcccccctcctttgtctcttcaggttccctgtgctgatggttatagtcacccactctgtccgacatccccagggccccacactcgcagagccaccaggaagcctcacggtcaccctctctgcagtgagaagggctcacactgtagagcctgggaggggagccctggcccggggcctggagcctctttacctgcagaccaagcgttctgtgccagcgagcaggaagaaattgtaccccatttcacactaagcatctgtgttcagaggattgagtcagcttgcttcaggaaacctgatgtttgctagggaacaaattagatcatcacaaagtaacctcatacactgcagttttgattactcactactctttttagagatgtctatttatttaaattccaattagtctgaaccgatcctaataattatgggctctgcttatgaaatttagcttcagacaggagttagttccagtcaacagcagtgggactcctgggtcagaaatcggattttggggcaccatgggtaggtggccctaaggctccatgtcctgcttgccactcctgatgctgcccacagagtcggtggtcactcctggccactgtttggccttcgcaggggttggctgggagagagaatggtggcacctcatcatctggttgtcacatataattaatgtgcttctgcagtgattggatagcatgttgggttttcagaagcagaatgaggctgcaaatcgaattgaaaacaaggaatatacaaaggctcacaaatcagccaccacagtgtgaagcagcatactttaagaagtaaacacccacttagaagggcagcatagaaatcagagtgggcttgctggatcatgtaatacagaagcgggtggtccttgtggctatcttcggtaaccactagtgcacctggatggggacaggtgcatgaatgggcccatatgtggacccacagagctggttctgtcattgtccccttgagagcagtgctccccacgcctagtttacagccatccatagcatgtaccgcagagttctggactgggctttaaacactcgggggaggaatcaataaaacagacaagactgtgtccactggtcagatggcccagggagattcttccctgccaggactccaatcttaaccctaccggattaacacaaagatggatattaaggcttacagaaacttggagaaaacctcagcatactgacagtgtatttccatttgtctgtattgagaaaagagtgaaaaacctgctcagccaccaaccctaggatggtctctgcccaagttccattcagcagcctggacctgcactggtccctgatgacagaccctggctgttggcacggccctgccttctcgacataccttgtcctcttttgactcctgtctcaaatgtatcacagctcccatagcttagtcagatttttccagcatcaaaaggtctttgctctttgccagcctgggatgctgctggggtacctgagagccactgtgggccaggggcatgtggtgcttggagagcttagcctgtctatgggatggggctgtgaagctgctgcgggcatctgttagcatgacgttccaaagtcctgcttctctggcattttcccccagtctcagagtagagtaagtgttgctggtgttaggagttctgtttgcatgcagcgatcttcctctaatggcagatttagcccagttaggtccattgccaggggtaggcactgccagcatttccactcctgctccctccccctcctccctgaaatcatcagtttcctctagttggcttatggattcccagaagcttttcttcactcgttcatcctgctggcagaagcagttgaaattcaaagacctaaacttggatattgggggtgggcttgtcatgcacacgtggggaacatgaggcccaaggtaaagatgaggtaaggacatgcccttctctaaggggcgtactggagcagccaacctgccttcctttccgtttacttcccaggagcattttcttccattgaggagatccccgaaaacgtggtgcacgaccacgagaagaacggccttcctcggctctcttccttcagtgatgcagaaattcagaagcggtgagaacagcttcctcaaaggggaggggggagtttttgtaaacctgagaagaaatttggggaaaaccccaggctgagttctgtacttggcagattgatcggaggaccacagagggctgtcggtttgcatcagtgagaggcagctaagctacaccccccattcggcgcctcaaaactctcagttccttctgagaatttccagccttaccttcacacagtccattaacatgaaggtgacatcattttgttaatagaaattagcaggcaactttgttctgctttggtaaagttttatagattgcttgctgaatatgatcttttctttataagaaagggatttggattgcagagatctcactgagtatttgattctcccagaggcattgtgcccactgctgtgggagctgcccctgcagtggttgtgtgggctgcatccagcatgggcagggtagagagacggaacccctgatcgcagcaaggacggagtccaggctgggcgcagtggctcatgcctgtaataccagcactttgggaggccgaggtgggcggatcatttgaagtcaggagttcaagacaagtgtgactgacagaaaccccgtttctactaaaaaaaaaaaaatagcccgctgtggtggcacacacgtgtagtcctagctactcaggaggctgaagcaggagaatcgcttgaaccctggaggcaagggttgcagtgagccaagatctggccaccgtactctagctggggcgacagagcaagactctgtctcaaaaaaaaaaaaaaagaagatggagtccttagctaatagatgagaaagttctcatgtagtagctctcaggtggcccaggagagcaaggctgaaaaggagtgaggatgcaaaagcagcggctcacgtcaggtcaccagctggattttgcctcctgggtctgcagccacctgccttgcatggcgcctgacctgcatggcacctgcccatccttacaacccttaccagagatgctcctggtgaggagtgtcctgctgttgccctgagcactcatggggcttttgtgagactcagtgagtgaagacacggcaaagcacagagagcagtttctggcctgtcgtaatcacaccgtgttctgtgatgtcactgttgtcatcgtctttgtcatcgtcactgctgccggccctcctccccagggccatgctctgctgccgcccgcttgcagctcacccagacctgctcctgccctctggagcgtgaagcctgactctctgttttctcttgccccccttcccctggcaatttgaattgaacttttaaaaatatgcccttaaagtaactttccctggcaccatctattcctgactcagagttcctgcccttatgattttctgcccaggaacaaaatttgtaaacattcttgaagttttgaatcattcaagtaaaacagaaggtagattaaatagatgtcttcacagtgactgcctacaatgagtactgtggccttggacaggtaaggttttccaagcctctgttttctcacctgcaaagtgtggtaataacaggattaatccacaggatcttggagtagattaagagacgtgtggaatgcattcatggcagcctcggcacgtgagggtcccatacacagtgctgcactccgctcattcttccctctcccgccccctcagctgtgacctcctgtggcatcaagttaacctcttgttcgtttttttccttagattgaaaacatacttcaagttttttattgtaagagatcccttcgaaagacttatttctgcatttaaggataaatttgttcacaatccccggtttgagccttggtacaggcatgagattgctcctggcatcatcagaaaatacaggaggaaccggacagagacccgggggatccagtttgaagatttcgtgcgctacctcggcgatccgaaccacagatggctagaccttcagtttggggaccacatcattcactgggtgacgtatgtagagctctgtgctccctgtgagataatgtacagtgtgattggacaccacgagaccctggaggacgatgccccatacatcttaaaagaggctggcattgaccacctggtgtcatacccgactatccctccgggcattaccgtgtataacagaaccaaggtggagcactatttcctgggcatcagcaaacgagacatccgacgcctgtatgcccgtttcgaaggggactttaagctctttgggtaccagaaaccagactttttgctaaactaatgcataagacctatgaattcaaatatctttattagacctggggctaaccaggtgaagatctgagcccagaaatgacccttcctccaccacacccctcctttgaggacgcccggggtctcccacaggcctgtgagttgcctcggcatatgacgcagaaccccaactgttacaacttagtttggatgtaagatgctctgaggaccctgcccacacccctgcgtgcattaggatgtcgctggcctttgctcacctcagaggggagaaaaggctaaagatttgcagtttgacagcccagcagggaggaagcatcacacagcgttaggagccgtttccttcaggtgttaaggaaggggatgcccctgaggttctcctggctagtcagggtggcttcacccatcactggtgggttgcaggaacagcacccaggactctgaggagggacagagaagcaagggggctgctgaaatcgcagagacttttgcagcatcagatctgaggagtaaaacggcacctctggccttcatcttggtgctgcgacaattgtggaggcaaagcattctttctgtgactattttgttcctgtagacagtcagcgatggccagagggtggtgtggtgtccaggggtccatctttccagaatccatgcctgtgtaatgctggtccatgcttctgaacctgtgtctgccaagcgcctatttcattcagcacaagacatacgattttagaaggtgaggggaggggaggctttttctacctgagaaggggagtgtctttgagggccttaaaaggaccatggcccaggaatgggggcgctggttgggcttggagctcaggctgctgtggatcccggcgcatcagttctgacttgccttacctgggtggacagcagtgaatctccacctgtcttctccagggagctcccatgttggggctgaagacgagcaggggcaacctgccagcatcacagaattcagtgtagtttatacatttcgattcctttcatctcagcaaaatgggcactgccagagccatttctgatcacaccaccatcctggaccatgtgactggaaggtgggtaaccaagttcaccagcaataaaacccagcgcccaggtagcctccagcagtgcggcttcctggcaacaaggtaggccctggtgcagggcaagccgcagcgaccatttcagataccgtccacagccaggaccgctgagaactgggacagtttcctgggatgagtgccagcctgagcctgcatggtgccgccgagcccggggtggaggagggagccaggcttcgcttcaaggcggcctctaccttttctcagaatggtttcctgattgtgtcaatgtgaaagttaaataaaatttatgtgccaaacctgacatgagctgcggttctgggaagggtgcctgtggccacgcgcgccccaggcaggtggggtaggcatgtgcgcacgcatgcatagctgctcagggtaagcagaccgcaggaggcccagccttcagccgccatggacacgcagggccgaggacgccacactgggttatttttctgtaacgtttagcaaagtcttgttacaatttcagaccaaatgagctgattgattacctctttgctgtttggaatctaactgtggatctgtatatgaatggaaggccttaaagctagtcttaattaaaatagtgttttccctcagaaacaaaattctggcccctggggtggtctcttcctcccctttggcatttgggtcattttcctaacatattttgccacacaagtggagattgctaccatagtatctcctggacatctcactgtgtccacagcaaggatgccgccaagcacggcagcccaccccgttcatttctgcacagccagtacccccactcccctgtcccctgacttccttctgaggctccagatccactaactccctcctcagcttacagcaggtggtgcacctccttctgccccctgaggcaccaccatgtggagggctctgctaccctgtctgggcgttcctcaggactgggctggatggtggcacagctcattcccaggcagtgacaccagggtgggggtggctggagtaggcaggcctagggggacctctgcactaacagcctgggtttgagagaaacaaacagcgaccctgcctccaagaagtgctagggcccggagggcagttcctaaattaggaagtttaataatacgaggttgacttaatgggtttgtgttttagaccgcttctctcctactggatttcactcctagcgcgtgtcaggtttattggtcttgtgttgagaaccactacagagaaatgcccagagctgagatgagatttgattttcacagtggctgactgggtgcacacgaaggtgtgcactcacggcctgcagggcacccaggtggcctctgccctgggttcctgaaaagaagagcctctgacacagcactggggggggtcctccctttcaccccccagctttctcgctctaaaccccggcatgctttgctcatctggaatctccagaagcagggaacagaaagggaaaaatcaagacagcagctaaatgtgaggcgaaggcagcctattggactaaactcaaattatgcagcatagtttcccaagctcctcggacatgccgagaccctcagcaggatagtgcagttacagggctgagcagaaccgcaggctcataggagatgagaggcctgggaagtgccaggacaaggctgcacctatccagcttgagtcaggaggcttcaggcaggtgaggtagccacacttggggagcattacagaagggttggccagaggagaggatgcccagggggatggaagctgcatccaaggtatggcgggtcggctgtgaaaaatgtgggcgcccagacaggaaggctgggcagcatcacatagggcttccaggggtgtgctcttcccctccgggaggaggggcaaacacaaggcaaccaacagctgtgatgattggggtgatagggggttgtccccaaagctgagggaggagcatgcaccagtacagactcacacccctacagcaagtagttggtgcctggaggggaagggcaggtagcttgatgtgaccaggaatggctgtgctctgcaagtttgggtgtcatttgggtaataggggctctggaggatttattttttctttttattatataaatttaaaaatatatgttggctgggtgcaatggctcactcctgaatcccagcactttgggaggccaaggcgggcagatcacctgaggttgggaattcaagaccatcctgaccaacatggaaaaaccctctctctactaaaaatacaaaattagctgggcttggtggcacatgcctgcaatcccagctacttaggagtctgagggaggagaattgcttgaacccgggaggcggaggttgcaataagccaagatctcgccattgcacttcagcctgggcaacaagagtgaaactcattctcaaaaatacatgtgtgtgtcaaagtgatcactgaactccaagtagctctcagcttcaaccgtttgtttttttgttatgtttgttttgtttttggagacggagtctcactctgtcgcccaggctggagtgcagtggtgcgatctcggctcaatacaacctctgccttctgggttcaaacaattctcgtgcctcacccccctgagtagctgggattacaggcatgtgccactatgcctggctaatttttatatttttagtagagacagggtttcgccatgttggtcaggctggtctagaactcctgagctcaggtgatccatctgcctcagcctcccaaagttctgggattgtagccatgagccaccacaccgggccccacagtttttgtataacaaattccctttctcatttcatctgccccttgccccactcacttaccgtgacttgtatggtgcacacacctgagaagctcagactggggatttgagtcccagtactttgacaccagagcccacagcattgactgccagctacattctactgactcaaatccattttttttaaccctgctgttctttggttcattgcccttcattcatctgaccaccccaccaaggcccccaacccagtgcctcccagcagcagctccccttggcttctcagcttgctctccccattcaccatggtgtctatttcaacattgtccatttttctcaaacttccactccattctcatttactgtgggcagatgaccttgtccccgacagagggaacaggtgccatcagatgagcattctccaacatactggctccacacctgcaaacttcctgtatccacacatcctctcccccttctactacagtgggcggggcttgcctcccaccttgctctgcacctccccacatctgttccgaattaccctcctgctctagtgccagctcctgtatctgcaccccttctccccactgggctctttcccggtggcattcaagcacgttcagggctctcgaatcctaagaccatcctgccttagctctttccccatcccacatggggccctgccttacctgtcacccccactccatcttgaatctagcagttttcagggcagtcagtcaattttccagattcttttcttctgtgcatcctttaatttctattgcttcccagtattcttagctcagttcttttctgtcaccactctctctgggcaaggaggcctccctgcagatcttcagttaccatctgtgtggaaataagccccatggggacccaagaacttttgtgtgttttgtccgctgtggtagcacaactctctaaaaacagtgcttggcacaaagttctcaagacttttcgaatgctgatttagacccaagtttgtgccttctgtctgcatgtctttttgagcttctgacacttataccacctgcctactaggtatttcctcctggttgccccacactcatttcaaacttattaattcctgagcagaaccttcatcttccccttcaaacctgttggtttatatgtggccatgatttcagggaacagtgacacaaaccatccaggtgtctgaaccagaaatctgagtcagaatcttggacaactccttcttattcactcctcacatccaatcagtcaccacttccagtagattcaactatttacaggtttcgggttcccggccacttctttccatcccttttgccacctctccagtatgggccactagacgtcccaggcgggccacacccacaaacacagatgcctgccctgctgctccccctgcctctgcctctgattttggccacctgcaatcatttctttcttttttttttttttttttctgagacagagttttggtcttgttgcccaggctggagtgcaatggcgcgatctcagctcactgcaacctccgcctcccaggttcaagtgattctcctgcctcagctgcctgagtagctgggattacaggcatgcgccaccacaccaccacacccggataattttgtgtttttagtagagatggggtttctccatgttggtcaggctggtcttgtactcccaacctcaggtgatccgcctgcctcggcctccgaaagtgctgggattacaggcatgaatcagcatgcctggccccacctgcaatcatttctataccccacagctagagtgggttttgtcaaataaaactctaattgtgttgctccttagctgaaactgttaaatggctccccattgctcttagaaaaaaagtccattttcttccacataaagtacaaggtctttaaggatttagactctggttcctctgcagtctcatctctcaccatctccttcactttcactccatgcccaacccataggctttggctgtagccatctattctcatctccatgagtttgccatggcctcttgtcatctccagaccttgtcacaggctgttccttgcaccccttctcttcaggtagctaactgctattcatcccttaatatccagctcagaaagcatttaggaactcttaagcccaagatgcccttccttgagatacaattcatcctggggcaaaattcctgtccatctgtgaacctatgaccagataagttacgtgcttccaaaatacaatggtgcaacaggcacagacatcctcatgccaaaagggagcaatcagaggaaagaaagggatgatgggtcccaagcagttccaaaacatagtaaagcaaatcacattagggtttatggcttaagattaatcttttttggtttgatgctctgccctccagacccactggagcagtggtctcaccttccagaaccactggggtggcaaagtcactcccatgacttggcctgttgccccacctcctatgttgcccatgctggtctcaaactcctgggctcaagcaaacctcccacctcagcctctcaaagtgctgggattacaggcatgagccaccgcgcctggcctctgctgtcgttagtgtcagctggcagtgtttctgttggtatcatcccatttctgttcctggccatctctgttgagatggctggttaggtccatgctccacacccacactaatctccttatcaaatggtaggtcagccatacccttgttctcttctgaacatgttttcttattttttgcaacatagactgagaatctcaaaatcttttggctctggttcctttttgcttaataattcagtcttcaagtcatttctctcttcttgcattttactacaaccaatcaggagaaaccaaactgcttcttcaacactacttagaaattgcttcagctaagtacttaatgtcatcacttgcaggttgtaccttccacaaaacactggaacgtcaacataagtcaggcaaatcctttgctgctgtataacaaagataacactttctgcattgtgcgatgtcattttcctcacttctgtctgcgacctcactagaatgacctttaccttccatatttctaccaacattctgttcataattatgtatatattctctaagaagatggatgctttctgtacagctctcctcttttctatttttttttttttttttttttttttgcaaaggagtcttactcagttgcccaggtggagtgcaatgacgcgagctcggctcactgcaacctctgcctcctgggttcaagcaattctccggcctcaacctcttgagtagctgggattacaggtgcccaccaccatgcctggctaatttttgtatttttagtagagacagggtttcaccatgttggccaggctggtctcgacctcctgacctcaggtgatccacctgcctcggcctcccaaagtgttgggattacaggcgtaagccaccatgcccagcctctcttttccatctgagtcctcatcagaatcacatttcatgtccatattgttagcatgcatctgaaacttctccattatctgtacatcatccgtttccaaagctgattccacattatttgttacagcagcacccacttcttggtagtaatttcttagtctacttggattgccgcaataaaatactatagactgagtggcttaaaggacagaaatttatttctcacagttctggaggctgagaagcccaagatcatggggttggcagattcagttcctggcaagggctctctttctggcttgcagtcagctaccttctcaccatgtcctcatgtggcagagaaagtgctctgatctccctcctcttataaggatactaatctgatcatgggttcctatcctcatgacctcatctaaacctaattacctctccatggccttaccttcaactaccattgcactgaggattagagtttcaacataggaattctggggcgcacaagcattcaggctataacactatgtgatcgtcagggcagggaatatttacatttgccatagcagcacccaagcctgaaaacaataggtgcttcatgaatgttgaattgacttgttatgttcatgcggatatggcattttctatctggacattcactgacctccttggctacccatatattgtataccttggcatggatgcagcaaccactgaatcttcctccccccttcccctgctgccaggattcaactagggaataagatattaactgaaactccttctaccctcaccctattccaaaaccctatcatgaacagctctcacccgcccttcctgtcccataatttgaggatggggatgaggaaaaataaaagatcattcccacagaaaagtggttgccaatttctaaatgtgtattttctttttctgggccatctcttgccttctcccttagaaaagtgccagatgtaaaacaacaataggaatttgcactttcattaatctcaaagtaacttaagtgtaagatatactttagagatctttgcacataatatcaaagctgtctatgaacattgagcagctcaactcatgtcaggccccactgctttggaaataaaagacatgggaatctcatctcgagccagccaagttggccgtgctccaccttaagacctggaggcccagtgagttcctccaggcccagaggttctaaaggaagaggtagctatgcctgcaagctaagccggaatggaatgggctgagcataaccagaaagaagaaagtatggccacctgtctccacactggtcctggtaataaaatttgtctacatgtagaggttagaaatggtgctttgtggctggatgagaatgcgctttaataagcattcattcaaggacttcatagaaaacccactgagaacccaggtgctaaggaaggaaaagagaattccttttaccttcctcctagatcccttatgcaagaaatagacttggagcatctggcttccaggccctttggttctacactaatacatttactccattttgtaaattcagaactagtacccatgaccctacacgaataagtgaatgggctctgggccttgcgtttttcagaaagtgaattgccctcaaaccctcagttttcaccaagatgttgataaggaatgacaggttaaagtatttgctcagtactcaagtttgaaagtaaaaactagcgtaggacagaatgtaccaagttaaccaccagggaagtggatcctgtcctgttatccaggaccaggttttattaaatgattcatagaatcagatccatttattccaagtagactggaaatactcgtgtcctgatcctttttgtatggttgaaaccacttcattagacatgttgcaatagtaaaaagcccgattagcttagtgtttactcattttatttctcagttatttaatattttgttttccttaatatccatgatgtttgtctctggtgttctgatgtaaaatcatagtgtgtattttttacactaatgttgaaatctgaaatatatgcacccatctttaattttgcgtgatgtgttttacgtgctattcctttctcagtgacagaaatgaacagaccagaatttgtgggatttgggtacaggatctccataagctgagaatgcccctcttgctgttgctgccagactttcggaggctctgtggctgagccccagactccttactgtttggacactgacgtgggctctggcctctgcattttccagaaccccagagagacctggaaagtcatcctcagcctccattcctggtcacagatgataatgtagaactggccttagctgtctttcctgggctctggctttctgccaccttggactttgctactttctgtaggacttagtagcacctgccatactctgccactccctcccctctaggctgagccctgtctcacagactctgaacaatacgaggcttttgctgcccaaagtttgtcatgattgatttaaactagcatgccaaaaataaattcctaaaagtcagtaagtcaacttaataactgtgaagttcagttatcaaaaacttatattatttttagggacaaaatcttaataacctggaaagatagatttttttaaaattagtttttgttcttcagcttaactgacacgtaatttacaaaacataaattttaccttttataagtatgcagttctatgttttagtaaatgtacttttgcgactattactacaatctagttttagaacacatttgttacccaaaaaatctcctaaatacccatttgaggtccagctttaggcccaggcaaccactcttcttcctcctgtttctgtttttgcctttattagaaatttcacataaatgaattaatatgatgtataaattcttgagtatggcttttttcccttagtatagtcttttagatccatccgtattgctgcatgtatcaatatttagttcatagactgggcgcggtggatcacacctgtaatcccagcactttgggaggccaaggtgggtggatcattgaggtcaggagttcaagaccagcctggccaacatgatgaaaccccgtctctactaaaaatacaaaaattagccaggcatggtggcaggcacctgtaatcccagctacttgggaggctgaggcaggataattgtctgaacccaggaggcagaggttgtggtaagccaacatcacaccactgcacttcagcctaggtaacagagtgagatcctgtctcaaaaaaaaaaaaaaaaagaaaaaaaaaaagaaattagttcatttttactgctgtgggaattccattatatggagataccaattttatctattcaccatttgatgaacatttgggttgtttcccaggtttggctcttatgaataatgctgctatgaacacttgcatacaagacttggtgtaggtatatgtttccacttccatgggatacctaggcatggaattgccggtaataaatatgtttttttctaatgaaaagaaaatcaatgttatggcttttccaaagggcaaaactaggctgaacttccatgttacagagagaataaaactaaagaattagccataggcaaattgcactgataaattatctgaaaactaaaaggttaattataaaaataacagcaacatattttctagtctacagttgatccttaaatattagtaattatggccgggtgtggtggttcacgcctgtaatcccagcactttgggaagccgaggcaggtggataacctgaggtcaggagttcgcgaccagcctggccaacatggcgaaaccccatcgctactaaaaataaaataacataaaaattagccgggcatggtggcatgtgcctgtaatctcagctacttgggaggctgaggcaggagaatcacttgaacccaggaggcggaggttgcagtgagcggagattgcaccactgcacaccagcctgggcgacagaacgagactccgtctcaaagaaaaaaatatatatgtacatattagacaattatgatcaaaagctgtagacttgtagaccagagtctagaagggtgtggccatgcttgccctgggcagccccatgacagctgatgtggaaagcgggaagaggctgacaatccttctccccagcatgtctgcatgaagccttgtgattcactttcaccaagtacctgatgtttcacaattccagcattcccgttaatgttacctcccattgatcctaaaaagaggcaaatatgaagatgtatataattttggataaatcaaaggtggttcctgaggaggaaagtgtccagaacctctgatctgcatagtattttacacacttccaagcataagaagatgaacagaatggcagaagtgagagtacccattttacagtgaggggcatcaaagaacaggaagtgcaacaaatgagggaggttcttgggctaccattcaaagctatccacttggaagtttctctgccagtttcatttccccatgttcctccagggggcgctgtttcctattctagctcctgctaaagccaggttccctttctgtaaactcacttggggaaactcaccaaggtactctccgaagctacaatcatgacagttacaaaacaccgctgttcggagattaggcctaggacatacgtggtcagatttttctctgttgaagagcaggtagagaatgggaaaacaagtgtacagaaatcaccaaaaatctcagagctgcgggaacagaaattttgtctgttttattaaatcataagttcaaaaacaatgcaaagcttccctccctagaagataattcctagtaaaaggctgctaaaacccacagggttttgttggtggtggtggtggtggtgttagtgatttgtttgaaatctggaacgccttgctttggtctttgtatggtttcaccatgattttacccatcctggagcctgccccagcaatacttgggacaagtcacactaactatgtatgtcttcctctgaaaggaatggtgacctgtggtgggcccagagcagccgttccagttacaaaggggtatcttcacctgcagtgaagaaagcaactctcagccacaggggtgttagccgaccttggcctgaatagaggctcctcagggctttggagggagttttagaaaaagaggcctctcagtgcctggcagagttgtgctcatcagcttcaacaaaacccatctaactaaatgcagggagcatttgtgagcaatttttctattcaatgattgctcaaagttgcagattattctccagatgatgttcttgcttgataagaacccagcaaacagtaaaatcaagatattcagaaaaagctttatatgtgtgtgtacgtgtatatacataccatataactcaggttggtttcagtaagcctacagctatagcttccgttcttggcaaagatatataaagtgtattctttgcttttatgtaatgcagcagggtttttcttcctttaaaagccttctgctccacacattgactgctttcttgcttcccatgttatcgtgtacacacttcactgacaaccttcagcctgtatcacctgagatatgtttctcctgcacaaagacacagcatcctgctgattctgtctttgtggtattaatggcagatggctttaaaaatgcttgtgggggtcaggtgcagtggctcacacctgtaatcccagcactttgggatgcagaggtgggatgctgaggtggatcacttgaggtcaggagttcaagaccagcttggccagcatggcgaaaccctgtctctactaaaaatactaaaaattagctggacatggtggcaggcacctgtaatcccagctacttgggaggctgaggcaggagaatcgcttgagcccaggaggcggaggttgcaatgagccaagatcgcaccactgcactccagcctgggtgacaattacttgtgggaatctgcatgtgaacgtacctggctgggaacaccctggcagatacagtcatttaatgccaggaataaagggcaggaaggtgtatagtgagagaatctgagaaatgggcaccaggtgtggaaagagctgtaatgtgaagtagaaatgggtaggcttgctttatgtctttaatttctttcttttttttttcttttttgagacagagtctcgctctgtctcccaggctggagtgcagtggcgcaatcctgcctcactgcaacctccgcctcccgggttcaagcaattctcctgcctcagcctacctggtagctaggactgcaggcgcacaccaccatgcccagctaatttttgtatttttagtagagacagggtttcaccatgttggacagggtggtctccatctcttgaccttgtgatccacccacctcggcctcccaaagtgtgggactacagacatgaaccaccatgcccagcctatgtctaatttctttttagcctgcttcctgctttttttttttttttgccacatgattctggagaatgccaaccgatatctacgagatctgtgaaactgagttatacatataagaactactttgtgaagaagatttaccaggacacatgcaaaggatttggtgcgagaaatttccattgtaatgctgtacatgctcaggttcagggacttctaagagggaaaaaaaggccacagagctgttgtccaatcaatagcctcattaccactcaaccaataactccattaacactaatgatggcttgtttccactcctggcaacaaggtctgtacttgtagaatgactaatggccacttcatacagaaatccacgccatctcctgttcaatgtgcatctgtgtcccaggcaggtgggatgttgttcatagtttatttttatacgctttgaatcatgtaaatctgggcctgatggtgaaaacttgtctgccaagggccagtatgtaacgacagtgatcgtgatgttaattgtggtggcccgtgttcatagcaccatcccacagggactcctcatccatcatttggctttaatgttcagccagtcctgctcatttgggaatcagcatgtcttcttgatgtaatggtaggtaagtttgattgtgaaaatgaggaacgggcgtgctcagtgcttgccgaggggctggcaccgagtctactaggtagaacaggggtttctacacctaaaacatgtcattgcggttcttttgctgtcttggcatatgattaattacttcacctttgtgtgttccttagtacttttcagtagacacaataatgccagctaccatcctgggatataatgctataaaaactaactatagttccttgaatgtttgtgtttaggaggtgatacaggctaaaaatgtgcttaagatcaagaagatcttagatgctatagtaaataataaagtatagaatttaatgatgagagtagaatattttggttttacacagcactttgaggttgataaatggacactaccaggctctctttcagaaggatacactgcatagagcatcatccctgtcatcatcaccatcaaataacacccctttgtagggcttaataatatatgatctgcaaagagctaataatctagtgataggaactctctggcccttaagaatgtacattctaaaatcaactaatcatttagtatatcctcttggtaaatgagaaaaatgtaaatttaagcaaacataattgtggagaagttggacctcttgtaggaagtcatttcaggatgctcttctcatttagttgagaatctcgatgtgttgggtgagcaaagagctgatttcactgaggacgccaagagcactgaatgtgccacataagagagggagaaacagaaagaggtaggctttaagggggtaaggtgaaaccagttgacaactgtgctgccagataagcagtaataatattacttttatttctattgtttaagtaacattggtataagtacctattttaccaatttaagaaagttagttcactatttcagtgttagaacaacatgtagtttataactaaaagcaccttgaaattagtatagatataaagattagatcaaaggggctggctgagcacacccacctacctctccttccctttgctttcattatttctttgcaactttcttcttgcccacctacccaggcaacaagtcctcctccttcccctaaaacactggggacaggagacagcaaacaagaacagcagctaccaacaagcgaacagggaatctcagacctaataatgagtgatgcgcaatcaagaaacatcagacacttgggggcaaagcagcacagtgaagcagaaagaacattccctagcaatagcagaagaatgtctttctgtgaaatttagatttgcaaaatctgaacaccttggaattgttgcaggtgaacatcatgccgtggccagggtagatgggccccgaacagaaataacacttctcaacaagcatgttgaacccgtatgggtccccactgaccaaaggccaaacttgagaggaagtgaccgaatacctttctagtaaagcaaattaatagcaatgctgttagtgccaggaaaagaaaaagggtcatcaattgaaggcaaattttaggtaatccctgcgaaacagaaaacagacagaatatgattaatgaagacaatgatagcctcaaacccagaaagggctgtggcagcaaaagagtggccactactctgggaatgttccaagttcggggacattggacacagggagcagcagggaacctgggaaacctgaaaagcgattgggtcgagaacgacattcagagttcccagttaggtctggccctttgccaagcttgtgccaagtaggtaacagcagaggtgtttgccctcagctcaaagtaatgagtggatgtgccccagggctggagattccacatagctcaaggggaacagggaggctgggcgcggtggctcacgcctctaatcccagcactttgggaggccaaggtgggtggatcatttgaggtcaggagcttgagaccagtctgaccaacatggtgaaactccacccctactaaaaatacaaaaattagctgaatgtggtggcacatgcctgtactcccagctacttgcgaggctgaggcaggagactcacttgaacccgggaggcggaggttgcagtgagccaagattgcaccactgcactctagcctggggaacagagcgagattctgtctcaaaaaaaaaagaaaagaaaagaaaaaaagaggaacagggagcctcggactcaggagatgagctgctacacaccttcctcccaaagagacatgcctcctccttcccctcaaacactggaggcagggcactgcaaagagacagcagttaatgacatgggagcagggaacctcaaacctcacaaccaaggagcatgagacacttgaggggaaacagcaccataaacaggggcagcaaggcccacaaggaacctacaggaggaaggaacctacaggaggaagcatcataaacagagcagacagaataggacaattacaagaagtatcactaaccatagttttcaaccaattttttaaattaatttatttattttttattatactttaagttctagggtacatgtgcacaacatgcaggtttgttacatatgtatacatgtgccatgttggtgtgctgcacccattaactcatcatttatattaggtatatctcctaatgctatccctccccctcctcccaccccacaacaggccccggtgtgtgatgttccccaccctgtgtccaagtgttctcattgattttgaaccagtttttgaaaaccagaaagatgaaattctcttgtccttcttttgtctcatttgagcacaggattatactgggctcctaatgagctggagctggttagcatcacctgcctgtccccccaccccttttttttctgtgccctggaacagtttgcataagctatgagttatttgttccttggaggttttagaaaatacaccccaaaccaccatatgggccttgaacctttggcagacagaatacctcttcaaatgttatttcatttttttctatggttgttggtttgcataagctttctactccactttggaccaactttggaacttttataatcctgtgagttgcctatgtcatctaagcttgcaaattcaatgaagtaaagaaatattaatttctaattttaaaaaactcttttgtatctgtagttaagcctcctttcattgcttctgtttttcattactgtcttctttctggtttttgtcttaattatacttctaaatatttgtctatgatgttggtcttctcaaatgttggtcttatgatgttggtcttttgaattatttttatttttttgagacggagtctcacttcgtcactcagcctggaatgctgtagcataatttcggctcactgcaacctccacctcccgggttcaagcaattcccctgcttcagcctcctgagtagctgggactacaggtgcccgccaccatgcccggctaatttttgtatttttagtagagacagggtttcatcatgttggccaggctggtcttgaactcctgacctcatgtgatctgcccgccttggcctcccaaagtgttgggattacaggcattagccaccgcgcccagcgctttcgacttttattagtcaaatctactgttttattttattttctattattaatttttgttcattcctttatgattactttagtccactttctttaagtttattttcttgctttttttttctttttttttccctgagagaaattttaaaatttttaaaattttcttcaaggctctaatttttctctcagcacagtctttgagttgtaggtctttttgctgtctagtcctaaagaattttgactttgacattctttttagatgtatttttaaaaatacctttaacataaatatgtatagttgctagaaattcgtattttgtttgcttgttaagtccttttaatgattaccatatcactaaactgtggtagtgaattcagactgtagacaaaatttttaattttttgttgagcgttccttcgtggattagggaaatgtcaaattgtttgaaaagtgcttttgtgaaaataattttataatatctctattacagagatatatttcatatatcatacaatttatcaatttaaatggttttgagtataattggtatgtgcacctgtctacctagtcaattttagaacatttctatcaagccaaaaagaagcaccatactctttcactattatcctctgtttcttccccaccttttccctcaccgagaaatgactaatttactttctgtctctatagatttgcttattctggacattttatataaataagatcatataacgtgatattttatgtctggcttttatgactaagtgtaagtgttcaaagtgttcatccatgttgtagcatgtagcaatcaacatcaaatagaagtggtaagatacgacattccttccttgttcctgattttagggagacagcatccagtctttcaccataaagtatgatgttaattacgaactttttgtagatgccctttgtcagatggaggaagttccatagctagtttgtttagtgctttttatcataagatgctgtcagattttatcacatgatttctctgcatcaattgagataatcaatggttttctcctttcttctactaatttggcatattaatttaatggatgttccagtgtttaaaaaaacactgtgtgcctgcgaaaattcccccttggtgatgatatataatcctttttatacaactctggattcagtttttcaatattttgttgaggatttttatgtctatattcataagaaatagtggtctatcaatttctcatgatgtctttggttttggtatcacggaagcaattgcctcatagaatgagttgggaagtgttttccctttttctaaatgttttggaagagtttgttaataattggaattaattcttctttaaatgtttggttaaattcactagtgaatccatctggtcctgtggttatctttgtagagagttctttattactaattcaacctcttttctattggtctgttcagattgtctatttgttatcagtttttgtagtttatgagtttataatgaatttgtccatttcatctaaattatccatttattgacacacaaattatatttctttataatcttttctatttctgtgatgtccttttttatttctgagtctagtattttttgtcttccttcttttttttcttggcaattctagttaaagctttgacaactttgttcatactaacttcattccagtgagatataaaaatgtcactgctatagctctattcacttcctcactttctggggcattatttttatacataaactaatgttaaacatgtaacactacattttaataattattatttttataattttatgtattttaaaggagctgttatgggttgaattatgttcccccaaaagatatgtactaagcctcagaacctcagaatatgaccttatttggaaatgggcttattgtaaacatagttagttaagatgagataattttggagtagggtaggcccttaacccaatatgagtcgtgtctttacaagaagaggagtgagaaagacataaaaaggagaatgccatgtgaagacacagagacacacaaggagaagaaaagcacagggaaggcagactggagtgatgcatctacctggtaaggaatgtcaaagattgctgaacaccagaagctaagagagaagcatggaacagattgtcccccagaaacctgcaggaggactcaaccttgctaccaccttgatttcagacttgtagcctccagagctgtgagaggattagcttacattgtttcaagccacttagttttgtgataatttgttgtggcaaccccagaaaactaatacagaagttaaggaaggaaagaaaaaaagtaagtatatatgtgtagcttttgttatttcagtcttcttatttattatgtctggctctctttatttgcctggatttgagttgctagctggagtcattttctcagccaaatacactttttctctcatccacttgtgctgttattggcatatatttctatatattatagacccctcataacacatcatatacatatacacacatgtatataatttctaacttatgtatataatttatatcatatatacacacatatatagttttatacaattactttgtaaaacagttaagggaataaaagagaagaaatatgcatttatactgtatgttataattacatgattatgtttcctggtggtctgtgctttatcatggggattgaagttactgtctgggataatttgttttcagcctgaagaatttctttagtgttttctgtaaggcagctctgccaataacaaatactctccttttttgcttatctatgagatatttgcctgcattttcaaaaaaaaaaagctctatttgcctgcatttttgaaaaatagctttgctgaatatagggttttttgttgacagttttttttttttttttttttttgcttactttgagcactttgactatattatcctaatgccttctggctctcattgtttgtactgaagtcagtggataatcttataagagtttccttgtgagtttccttgaaggttcccactcagaagctggacgtcctgcttgagatattcttgaaagaatatctcaaatggaaaacttaatattttacagtgcttaaattgttatctatagagcagttaaggggaacgataatcttataacaggatctgcatgattcttggacagtgattgtttttttttttttctggctgctttcaagatgttctcactgtctttggctttcagcatttttatggtgatgtatctatttgtgaatatctttgcatttatcctatttgaggtccatcgagcttcctagttgtgtagattaatgatttttcatcaaatttgggga

SEQ ID NO: 9 - DNA, 45770 bp, Homo sapiens
  allele (1)..(45770): CHST10 Variant Allele (rs17024136)
tgaggcggtgccggcgttctggcccccaaagccggtctagcgcgccgggcgtcttccttacttccgctgccgccgccgccacatcccgggacccgacgggccgcggcgcggaggcctcggggcaaggtggggcgggcctcccgagctcccaggaccccgcgcgcttcgcccacaggcccggcgaagcccgacccgcgcggcgcccccagggccaggggaggagcctaaggacccggacgagcgccgctccagtagggtgagctcggggacgcgcaggcgggtgggtttcagcgcctgggcccctctccccgccgcggggcgcacggaaaaaccggggaacccgcgggttttgtcctggcgagccacatcccggtgtgttttggcgacttgaagacctccctagttcgcgggagtagcgggaagagccttcctcgcgttaattatgcaataagaaggcgtccttgtgcgggatgctgtgacccgcggaattattgatattgtgcgagcctacaatttacttctttcatccttggctgagaatttgcgtttgtaattgtagatggagagaggaagaaagggttcagcttgggtccaaggagcatgcagaggaaggcagggaagaaggagcatgtgcagcttcggtgcgaggggagtcaggggtgggaatgcacgttccctgcctgaggggccccggggtgccctgagcctctgatcttcgctgtcaggaggcctgtccgaagttggaggttgaggcatgcagttctgcacttctggctgggaaggtgaaccaggttttccaaaatgtcatttttgctttccaagtctgcaaggcaggaaagggttgggcagtgaatggaaagtagtgcagccaggttctggttagctcagcggcaggactgtcataacggtgggtttttgttgttgttgttgttgttgttgttttgtctgaaaaccagagtctggggctttgggccatgaggagttgggttattgcattgcttagagtgccagagtgagaaatgtctcagacgctgttaaaattaggcagctcagtttagctctggctctctgataaccaaccacctcctccttcactcttttcagtgactgggttaaaatgaaaagacacaaagagagaagtggtcttttcccttccctccccattataattaagagcttagtccatcttggctcagaattggaattcagaattcagaattgctcttgaccctgaagaatagaatctcaaagaaatacctgagcagaaaattctcttcttcgctgaaatgaaaattggagtgtttgcaaaactgaacaaagaaaggaaagaatttgtaaacatcacaggcaacttgcagttatattcggatcatttttcagtgtttgaggagttcatacaataaaaaggtgagagagagccaggaatagaaacaggggagagaggtggttgcaggaccttagagattgcagaaacccaggagttcattttcttttcatacacttctggataacctggatgtgaggaccatcaaatgccgtacatgatgtttctaacaatgatggaccacatatacaacagtggtcccataagactatactaccttatttttactctaccttttctaattttagatacacaaatacttaccattgtattacagatgcttacagtattcagtacagtaacagcagtacaagttagtagcccgggagcaatagatgattccatatagcctaggtgtgtggtcagctgtaccatatagcctaggtgtgtggttagctgtactatctaggtttatgtaagaacgctctgatgtttgcagaagaacatcgcctaacgatacatttctcagaaggtatccctattgttaagtgatgaatgactgtatataaagcttaatctttcaatcaacataataggaaattgcttttaattttagcattgagttcttagagtaaagggaggcagagagagaccgtgctgcatgtgtcccagtcagcttgggctttattgtatgttaaatgagttgtatgtttattttggtagatctcctaaatccatgatctaattccatgactttggcttgtttctggttttttatgatatggcatttggctaaaattttccaggtgctaaaggtgtaaggagtacgaaaatccagagaacattttgcattggaagaattgatcatcttgtataggaatcctataactatttcaaacatacgaaacaggcataattggatttgattatttttgctacaaaaaatgtttcatttttcacactaagttacatggaagagtcttttaaacagctagtggttttggtacatttagaatattcatttaccaagaaatccaaatataacctgcctttgtaagagacccattctgccaaatatatttgaatcatcaaaatggttcactatttccttcctaagtataaaccaagttgtattaagtaagttgatcttgtaacttttaataatgcttttttttttttaattttcctatccagtgacaagaggaaccaagaacctcagttcaggggaaacacagcaaggaaatgtgagccccaggctgcagaaggtacgtgaaggagaatgtgagctcatcagttatttgagcatgccattcagtattgttcctgccttttttcttgcctgtgcagattgtaaactcttgattaggagtatgtaaatgtgtgcttagaaacgtttccttaaatataataataggagcatgctctgaggctgggattatgtgagttagtacctgctgagacctgtgcttggtacagagtgaaccccatacaggtgtttactgtatattattattattgttcatgaaaacctgtcttaactacaggtgtatttctcactggacagttaagagtgttttcattctcctaactaagggtggttaatcgttccaaggcggtaaattgtaaggatgacaacagagaagacaaaggaaatttctgtacgcagattgagagaaacctttactatgaatttgaaagtctcagtgacatgcaatagaactttatagtataaattcatatgccacactttgcattatggagttgtaatttaatgattctattgatagggtaatgcattgtagttcagaatgtgctcagggttgatggtgaaatgtccccgtttctgcagccctggtctgtctagttctcatctcacctgtcatcctcctggggttaccagttccttgtacattaccaggtttttgtgtgtgtgtgtgtgtgtgaagtttcctttagagtctggctgtgttttaaaagttgagccctggacatgtgatccctggtatgtgtatgaggtgaggttgtcagtaaagggccattgacaggcctcctcatctgacccacccctgtccctgcttgcccactctgcatgaggaacactggccttcttgccacttttggaattctgggacccagaccacagtctttgcccaggggtctgcatggcttgctcccacaatctgtcctgccttttctcaacatcctgcccatgcccttgtttattagccactgcacctgtcacctggcttgatcatatacattgatcacttgatttgtttatggcccgtctatgtctgttagtaggaagcactgtgagagcagggaatgtgtgttgctatatccccagggcctagaacagccccggctcagaggagggctttggtaaatattgctgaatgaaaaaatgtctggaaaaagcctggttaagcagagttaagtgggcttatttaccatgggacttttcagaaactttagtaagtgaatgcgcatattaaaagtggggcctggcaggtgggaggcaaactcatcagcagagtaagaaaggcgctgtgcttctggatgacaactcagacatggggaaaagctgctggcgggaatggtattggcagctgagcaaaatgaatttacaagtttccttttcaaaatgcaggggaggaaggatttgcatcaagagatggtaatagtaacatttccattgttagttattacaaacatgtacaatgtgtgctatttatcttttatttaaggtggggaagggggaagattagggcttcttgtagattcttccttccctgaccctgctttccccataaggccttaagttcttcagctgccagttcatccttgtgggttgaactgaggaaccaaaccctctggcttggtttcagatcctgacatcttgacttgtgaaaatcccatttaatgactggaagtaggaaagctctgaagatggatatgcagattctaggggtcaggaggctctgttcagggcctgcgccatgaccgaagggagggcgtgtaggggctcaggttctgctcccaccattagctctagaggcactctgagagttgtcttggctccttgaacaaaggggagttaattacagaaaatgccaggctttttaaaggccatttgtcccctagctgtagggagagcagcagcccttggcagagccctgaggaaagactctttatgtcaggccgcagtcctcttgtagacagaaataatgagccttggtggtgtcatcctcagataggaggcaaaccccatggtgaaattctgtattcaaggaaacaatgcagagaatggggcggacttagaggagctggggtgaagtgaatttggaatgcctctcttttaaaaaaaaatggggcagagttttgtgttgttttccaaagtcagacaaagcctgattctacagagtctagttaaccgtagatgggagggctgtaaaggagagtaagatgaaggcagtgatggaaggtcttagattctaattaaacctcttttagctgtgtatttggaacacttgtaattcagagcatcaatagactctcgttgactagatgcttttttgctgccaattttccttcttaagatggaaggaggtggtgggagaatggcgtttatgccagaatgcctagagtctgcattttaacaagatccccagggggattcatgtaggcattaaaatttaagaaggggtgaggtcctggaccagcaattctcagtcccagctgctcattagagtcacgaacagagctcttaaaaaatgcctgggtactgcctccagagatttgtgttgtcttggctggggtattcttggggcccggggtatcactgtatttcttggaagtttcccaggtaccgccccagacataaagccagacaccttcaggtagatgtctagattcagaaggcacataatcccgaagcaaatgacaccatgcttagctgggcacaccactctttaggattcatcaaaacccaccacaccagataatgtggatcctcgtagctcatccgctggcttctagagccacagccagagatgatgggatgtggagcacccaaccggggttgcttgtgccgggttagaattctccctcctccatgaatgaaaatgaccttgagactgggcagtggctgagtgggcatttgctttttgtacctctgactctgctgctgaagaaactgtttcaaaatttaaatcagatcatgacatcaccacccctcttttcatgtaaaactctcttcaggggctcccattgcttgcaaagaaaagaccataatagccctggcaggccccatgttgtctggcctgcatctgcctcagcctgtgccccagaactccagccacatgggcctgcgtttagttactcaggggcccattcccttggcctggaaccctgcccttcaccttaggtaactgtgctgtcccagaccactctgcccaaggcacatcccattgtattttctccccacagcaccatgtccctctcacaccatcaagtaccactcctcagatagcttctttccttcgtgtgggcctgttagacgacaagctctgtaaggacaagaactgtgtgtgtttagttagggactcagggtcatatccttggcagctgttttactgcatgaatgaatacactggatactggataatgaataatgagcttgaagtcattatttttaggttattttgtccttaaacttgtatgcacatacacacctactcatgtttgagtgctgtattttgtaaactgtagagatattggacctgagggaagtgggtattttgagagagtactgggctgtagtcttactggttctgattggctcatgtaggatgtgacttgtagaacaagtcccagttttctaaatttttaactaggccgggtgtggtggctcacgcctataatcccagcactttgagagtccaaggcaggtggatcacttgaggtcaggagttcaagaccagcctggccaacatggtgaaaccccatctctactaaaaatataaaaattttccaggtgtggcgtgcctgtaatcacagccactcaggaggctgaggcaggagaatcgcttgaacccaggaggtgcaggatgcagtgagccaagattgcaccactgcactccagccggggtgacagagagacacactgcctcaaaaaaaaaaaaaaaaaagaaaaaatgcttattacaaatatttaaaatatgaattgtataaagtacaaaaagagctcttactgtcctctcatgattttattctatgtattacatatatgtgtctatgtttgtatatgtgtgtaatcatatatatttcacacatacatgatttttttaacaaatgggatcatacattccatcctgcaacttgtcttttttgtttactggtatatcttgacactttggatatggatctatgtcattggcttgcctttcatcatagagttttatttgaaatgaaaatgtttttggacttcggcatgatttcctaaaccccccaatcaatgtgttttaagtagtaagtgtatttgaatgcatatacatgctgtggcttagatcattttgttttcaaataatactgaagtcctcatagcatttggttgttttctagtctcagttaatggatattaaacatagaactgctctgtggagactagagaaatattttgaggttgaaagggggcctcattcttgaaaaagcctggagaccctcagggagagggttgggcaggctgcctcctgaagtacctttccacattcctgagttctagtaagttgctcaattgacacagtcattcagcaaatagcaattgttggctcatggtgcgccaggcactgtgctggtccctgctgtcctgaccagcatgagcccatattctgcaaggagagcaaatggcacatagcgagagcatctggactgtgctgggtgtagtggaggaagtggagcaaggtcaggtggcgcagagcggtgctgggggtgccacctgggtggtgatgaggcagagctgactcttcctctgctgcccatgggaaagggagcaggccctgcttaccccgagtgtacaagaagcccagtggccgggagcagctcctcagagagctccctcctggaccccgcagtgactgcccacaggctctgtggcctgcaaggggctctacagccagatatgggcatgctggcaggcagctgtgcttgaaatgctgataggggcctggggtgtaatgctcttctcaagagagtggttttggcagggctagggttttgcccctgaagctttgcaaatccacatcccccactggagtctccacgtgtcctggtaccatcccggggacaagaagcagggaaaaagcaggggaaggaggtgggaaccctgcagtccacccttctcctatcctaatggagtggccagggaagggactctctgtatatcttagtttagtaagagtttgcagaagtcaagttaaaaatggattttttgaaaatgaaatacccatgtgaaagaacacattggatgatacatggtcagttgcatgattgttgagaaggtcttctgactgatgagtgtgcaggtagctgtttgttcctgtggatgaaaaatgggagcccgaagagctcttcattgacacacccacagccacctagctagggagagggtgagtgtagaccagtccctgacctcctgcccgggtgaaagactagctacggagacggtgagtgcagaccagtccctgaccccagcccaggtgaaagactagctagggagagggtgagtgtagaccagcccctgaccccccgcccagctgaaagaagctaagagctcctgacttttaaatgaaaatccaatacttaggaaggcacatatggcttcaggagagtgcacctctcagttttcaactcatgtagttggagaaatcctatccctaggccacctggcttcctggagaacagaagaggtgctattcattttcaggtaaggcttcattatcttcccactttacctgcagatgagctcagtgggcgaaatcatattacattccttcagaagactagttccattggaaagatttgattcttaaactataaaaacctccaaagtgctgtcctgaggccgggcgagggtgatcaggggttggaagcctggagggaatgagcagagcaggcagtggaatatgcagttcccaggtcctcccgccacatgctctgcagagtcagcgcgtcacctgcaggagggaggcagtgcctcttatcgttgttccctttttcatagcactgatcctaggagagggtgggttgcaagccccaggacactcagagccaggacctgtctgtttagaattgcatgcaacctgcgtggtacatcctgttccttttactccctccccaacccaccctggtgcctctgctgcttggttagaaatggcctgcagctggcatttttcaggggggtgctctcactgtgacccatgaggatggacccccctgagtgcactgtcttagagggctgagctcagtggacttggtactgctgggccctgcatcctctggccacagtctaagcctcagtttcttgaagggaagttagcagttgctggaataagagtgtgtcttgtttttttctctcttcttggtgtagaccctactgtcgcattaatttctggcaaccacactgagaaaggtgtagattaagctggaaaatcacgaagagtgccaagggattggtcagtttttactgggggtctgcaccaggccaggtgggtgctggttttttgtctacattgtctcatttaatcctcatggccactctgaggtagtggtaggaggagggccttctattagagatgggacattgaggcttagagaggttaagtgacttatggagtcacagagctaatgggtgtgagcagggatttgaaccaagtctggggttctttgtgcctcactatctctgacatggagtggcggaaggaggaggggattgtgggatggagacaggagacaggacagctggcttgcaaggaatttggcatgcccctgctgggtggtgttgctgataaactacagtacactcggttaaatgtgaagttcagaaaacaacacataggtttttgtttttgtttttttttagtataagtatatgtaatatttgggacatactttatactaaaaaaattaactgaaattaaatctaactgggtatcctgtgtttttatttgttcaacccgacttggggaacctgggaaggacactgggcctcatatctgggcacaaaaaatactggttttgggggggagtataagtatgtcttatgcaatatttgggttatacttacactaaaattttatgttatctgaaattcaatcttaacttgggggatgtcctgtatttttatttgtctaatcaggcaaccctattggtgaccccaggaaacacacgaagccttatacacgggcacctgagggtggtttgcgagccatccggagaaaacccaggcagcttggcaggtggtgagctccccactgcaggctgtattcaggtgtggccggataactacgtggtgggtgtgtcatggatcctatttgcattccagatgcctggttcctgtgagattctaggatgtaaatgttgagacaaggagagtgattcacctgggtcttcatggagctctgacccacccagggttaggaggctctctctgaaattatttgccatcagcactgtgttgaggggaccacttctccctgccatgcagaagtgatggatggcctcagtcagtcggtggaagccagctcagcccagggtcttgtctgtacgtggagagctttggcttgaagaagcactgtgttaaaggtgaaatgaaacacactttcttgtgtcacctgccaagaactgacagtgacttcccagttctttatgtgcctcctgcaggagagtgtggcttctgtgccaggctgaggaccgacatgccccgtgttgctccctggctgtgacagcatgaaaaacacccacctcagtgttctacccaggccgctgctggcaagtgggcggaggcgagaagcgtcagtgttcattcctttgcttttttagagcttctctaggtgtggctacatcttgtcagccagtcagaattttaaacacagccagctcctaattgccccagcatggcttctgcccactatgaatgaccctcagctaaggcctagtccttggcaggcctcttcctgccacctgcttccagaccatcgtgggagctcactgggaccttagcctgggcccaacaggagtcagggatcaaatgtgcaaaggagtcttattctgtgttctgagaacacaaggaagtggtcttctctcattatcatgtctctccattagggtgttctaaatttgattttattattgaatcaatcatttatattattaattcaatatgaaatgttaaatgccaagtcaaactacctattgtagcagtggaaaaaaacggaaatatttgtgctgatacttactgactgaaatcacctgtcgttttcattcctctttgttgacttgatgtatttgtaagcagcaggggcatctcgcttgtgttttccaggaagagtcagtgaatggctgcggtgtgacaacatgcaccaccagtggcttctgctggccgcatgcttttgggtgattttcatgttcatggtggctagcaagttcatcacgttgacctttaaagacccagatggtacgtatgcttcatggtggaacgaattttggctaatttagacctagctgcaacactgttcctaggtacatgcatagatgacttctgtcacagagtcaaaggactttcatgccagcagggaccttggaggtcatggcctccgttccttcatgttacagaggtgtgaggggaggtagggtgggaggggctggagggtcttttcaagcatctcctctggaggaaggaagctgctctttgtggctgaggcctgggtggtgcctaggagcaaggagcagggtctcctcccagcagcacagtggccttatgccttgcagcagggcgcctctcaggctcgcagttgggaattctctttgcctcatgtcatcatgagaggtgcagcctcaactgcttggcatgcccgtgtggtggccacatgtttgaaggtcaccctccatgcagcggaggagggtcatttaaatgtatgtcttcaggttgtcttggaggctttcttagctctcctttactgaacgtaggcattcagatgaggacggataaagagcgccaaattgggtctcagaatgctgattctacttcgtgctcttgtcatttgcttatctacatcacaatgtttcttccaccaaatggacaccctgcctgctccggcaccgcccatgattgccctgagcatggtgaggtgctctgtggtctgtggagtgctggatatgtccaaagaggtgtgtgatatgctctccagccccgaggccacttcattgagtggccaagcaggcaagcacgaggaagccagacacatggagtcattgaagtcctcatttgtgccgtggattggcccattcctttaggctgattgggagatactggggaacgtggatgagcacagcactttgctgtgctctgcaccgtactttgtcctcctgccgatggtggccttggaaaggggcagttagagatgcctctgtgccagcagttcttcctggaggctgcactgacctgtgctgtctgtgtgggacaggcccctgctccacctcacagagctcccaggcatgtccctggctgtgtcaaggactgcccgatgtcctacacctcctgccccatcctctctctgccccaccttgtctgcagagggacagcaaggttagaagggaggtctgcagggaaaagagggacaccctgaaattagcccacatggtggttctccccatgacagttgttgggccctgattggctgtcatcacatgtcctgcctcatcctccaggagccctggagagaaacctgtgaggtctgcacagcctcgggaggtgatattacacctgcaggtatctgggcaggtgtcactgagcatgacagctcacgcccgggactcggggttccgtcagcagagcaagggtcgattcttggagggttgctggaatgtgacacgatgatctcagtttgacagtttggacatttccatggcagcttcagcacagtgccatgccactgagagatccctcctgaagccctagagccgggttctcatccccgcagcacttcagaatcacctgtgggactttacagacctgctgctgcttgagacccagtgaaggagaatcactaggggtggggcccagttgagaagcacagtggtagatcctagctggagaactgaagagaaacagagctgctgagaataagaaataggtgttactcaggattctcctaaatgtcacctcctggtatggaaggcactcaaaaggcaggtcatgaggttaaattgtttatggtttattttgcttaaaaaagtaggagtagatgtaatacattttagtgagacttctataggtaatagttaaataagacttgtgcctttgtgttttactgttatctggcagaatggcctctaaagaatgccttgtttcccagcggcatctggtaaatgaggtctcattctcctttgatgtatcaagttttgtgctgaatgttttcagtgtagacactgatcctggaagctaagcaggggtaggcccggttagaaaaaaagcaagtgtaggcgcagaacagggttttgtgaagcggagaaaaggagtggtaaggagtgttaggagataaaacctatgaagaaagatgaagggctttcggattttacacctggagaggagcaccgcagcggtccttaatactgcctgtgagatctttccagccggctgccttcaggcgagtgaaagggggcactttccctgccctgtgagatctggtgtggtgtgtgggtgctgggtcactgagatgggagtgctgcccctgaccccgaggcaggggctgctggtggtgaggatgctgttggccgcacagtgtgcagtgaactcagtgagaatcttctgttgtgggcccactcccgttgcggggtgaccaccacagcactacccagcctgcctcactcgcgtgagatgttacctaattgtcccaagggacctggttaggttaggatcctgaaggtggatatccgccagctgagttctggatgcaggatgcgagctggcacccagcatcttgccagtgcacaaggacgctgggctgaagcatcaagagcatttacactcagagcctgcccctgcaggcgtcagagaggccctgggctggggtggtgtaggcctctcccctggagcctgcccttccagcactgtgctttagagagtgtgtcccggagcctggatcttgggcagcacaggaacccctctaagctcgtggccataaagggcttctcacatgttggagtttatttcacacacgttcacggtgtttttgattatgaaccagaagcccattgtgaagtgtcaagaccaggaaataacagacacggcagtgtccacggtggggagttccatttcctggaaagtgcgtggagaagccttggcctcagtgctcccgggctgctcctttcagctctgtcctctgggacagggccagcctcagaacccccatcagtggtgtgcatgttcttctcacctacctgcctttcccggtttctcctgccactggagcccctaggaagagcatggttgtcgtgagttgctgtttaaagcaacacttactttttttagtgttacagtttctgttcagctcagcagtggagccagtgatatttgtggcaatgatttatcctcagttagcaaatttcagtatcatattgaactaggatcaggtgttgtaactagactttctcataagaaaataaatccccctcagcgaagggaatgtgatggaatcatatggcaagactcaaaatgatgcccttgtggacctggtttgtgtttgtaggcgctggtttttcctctcctggttgacttcctcattggttctgagccgcttgagggcagagcctgtgatgtgaaggtctctgcagccttgaccatctttgcatgtacttatttgccatctgcggatactctccagtgaaatgtctgggtgtatcgtacctattttctaattagattggttggttttttaattgttgagtttgaggattctttatatattttagataggagtccttggtcagataagtggttcataaatattttttccctatctggagcttgtcttttcctcctcttcaaatgggctttcacagtgtagattttctctttggttgttttttaaaaagattgatggttttatgtttcacattcaggtctgtgatccactttgagttcattgttgaataaggggtgaggtttggatcaaggtttgttccgtgtgtgaatgtccaggtgccccagcaccatttgttggacagactgccctcctccgctgaatggcttttatggctttgtcaaaaggcatttgggcatctttgagagcttctatttctggggcctctgttctgtcccatccacctgtgtgccttttccttttagagaagacattcaacctctctgtcttccagtgtacagtgccaaacaggagtttctgttcctgacaaccatgccggaagtgaggaagttgccagaagagaagcacattcctgaggaactgaaggtgggcacagccaggccgtggtccttgtcctcttgaacacggcacccttgtcgcggggagctggccttcccctgtggctggttccgcttgtcatcacgtctgcgttagagccttttcctgtgttacttctccatgttagttcaccttgttaatttccatttgggagaggcacaggtcacgtctatttttgtgcccctcacagagctctgtgcatcagggctgctctgtcactgttggttgtgcagcattcctgaccagctgaacatgagccttgcctggggagccgagagtattgggcagggtcaggaggaaaccagaagtgggagaagacatctcacccagtcatggggttttagagtgaaagggggccctggacagcagaacaactaattcagcctccaaattgtatggatgagagaactgagcctagaaaaaaggtggatcctccacagtcccatggagttcctggcggagcccaaggctgctgacttccacccagcccttgctggcttgacattctggctccatggctctctgcaggcttcttgtgcacctaaattcctgatcattccctagctgggatgaggggtgcactctggaaggcctctcacttcgtaacccccattctggatctagagggttgaagttgcaattgttccagaaggaatgaaatgggtacagcgagccctaaaaatatttttagcccagaatcaagccgtagaggttgggacagctcctatccatgggtcacagtgtaaggatgataaattagaactcaataaacatagaaaacatacaccagtcagtagagtgctgctggaggttacttctcgtaggacattgatggaatggaggccaagtttacagaactctgagacagcctaaatgttgcttttaggttgaggcatcccagggtaagaaaataatttggatggggtacagaaacgaaaccaaaaaatcttatgggaaataggagagtggctttaataggatggatttaataggaaatcaaagttacatggataaaaacaaaggtagggtaagcctttggcaaagtgtcgcaacaaggttccctcaaggatgccataccctgtgaggaagagggtggtcatcttggtgctccctctccgggtggagggtgctcccggagagattgccagcctgcaggagtcattgcaaataaaaagactgcgcctgaatgtgctttacagtttgcagtgtactttactgggtttcaatctcattggtcttccgagccgccctctgaggtatatttttattctgtttgcatttgggaaacatgaggctcaaggaactgtgctcactgggtcagtatcccctggacagcaagttgtgggcctgggctttgaactcagtgtcctctgtgcccctctcttacccgctgccccagtcattctcatgagactcagatgggaggtgagggaagtgggggatgtcagaggtgatgtccgctgaggccacatgccgttaggtgacaccaaaactcagcatgtgtcttctcacaagaaaggggatttatcaacatgatcagattctgtagctcacctttaaaagtttattttggccaggtgcggtgcctcactcctgttatcccagcactttgggaggccgaggcgggcagatcacctgaggtcaggagttcaagaccagcctggctaacatggtgaaaccccatttctactaaaaaatacaaaaaaatagccaggtgtggtggcatgtgcctgtaatcccagctactcgggaggctgaggcaggagaatctcttgaacccaggaagcggaggttgcagtgagctgagatcgtgccattgcactccagcttgggcaacaagagcgaaactcggtctcagaaaaaaagtttactttgtgcatggtgtagccgaatgtttgaatggaaaatagaaaataatatttgtctttaagttggctttgtatatttccaaagggaaaaaagaaaacaatgctcattcttacacacaattgaacaagaaatcttttttctttagctgggcatggtggcttacgcctataatcccagcactttgggaggctaaggcaggagaatcgattgcgcctaggagtttgagaccagcctgggcaatatactgagacctcatctctacacaaaatacaaaaatcaggtggttatggtggtgtgtgtttataaccccagctacttgggaggctgaggtgggagaatcacttgagcccaggagttggaggctatagtgagtcatgattgtgccactgcactccagcctgggtgacagaacaagacctcgtctcttagaagaagaatttttgtctctaatgctttgctaaaagaaaagcaatatctaatatcttttctttgttcaaagaaaagcagtatctaaaagtgcagagttttctgcattttctaaagggaacttgttgggaggtgctctctcctgatgcgctgttcttgagtgccatccatgatcagggttaggtttggaacagagagggaggagaagacagagaggctcttttgggataagtgagcaagaggtgggatggatgaggaaatgaggttaaacgagacccgttcttgtaagagcaaggagagtgcctggcgtggctcctggttttccatggtgggtggagggcccgggcagccgctgatgccctgtggggaggaacggaggccactctgcaaaggggcctctcgcttccccagtgtcttcatctcgaaaagcaggcagtcagtagcccccaggatgctcttcccaccaccagggaatcccaggaaattcacttaaacacacaagggagaaagcatcctggccagaggtcatgagtgtaagagagtttggttacagtagatccataaaggaagagctgggtggggggccctgaggggggacctctgtcatcctgatagttccagcgtcccggttctagtgtgttctagaagtcttatgtccttcccattttctaactgacgttgtcccctgggaggacaggttgttaaaactaccctataaatggatttcctggcaagcccagtgcattttaaaagatataacaaggatatttgggtccattcaatacaattatttggaaggatcatctgctttgaaattttgggaagttctgtgtagctttaagagatagatatggccgggcgtggtggcttacgcctgtaatcccagcactttgggaggccgaggtggcggatcacaaggtcaggagatcaagaccatcctggctaacacagtgaaaccccgtctctactaaaaatacaacaaaaaattagccaggcatggtggtgggcacctatagtcccagctactcgagaggctgaggcaggagaatggcgggaacccgggaggcggagcttgcagtgagctgagatcgtgccactgcactccagcctgggccacagaacgagactccgtctcataaaaaaaaaaaaaaaaagagagagagagagatgtagcagctgaagccttaaaaatgctgagaaacagggccacaactagagggggccgatggggttggtggaggctgccctgctattcaggaatgccctcaggatgcctccagagaacaaggaggtgtgagcagcaaggggactttaactcaccgaggacagggggcctctgagcaacttctgtgtgtactggcacatctccctgtgccccctccaacccatgcacacacaaggcctctcacattacaggtattctcttaggttctaaaacagccctgaaaagaatggaccagcatgtagaatttgagctttttcatctttttccccctagctagaggattccaaacttcttactttggtttttaatttcttttttcccccaagacggagtcttgcttgctctgtcgcccaggctggagtgcagtagtgcgatcttaggctcactgcaacctccacctcctgggttcaggtgattctcctgcctgagcctcctaagtagctgggattacaggtgtgcaccaccacacccagctaatttttgtatttttagtagagatggggttttactatcttggccaggctgatctcgaactcctgaccttgggatctgcccaccttggcctcccaaagtgctgggattacagacatgagccactgtgcccggccttattttgttttttaaagtcaaacttctctccaaagatctgaggaaccaagcttgcattcattttccttgcccagcctgccgatcgggctggtggagaggctctgaaggcctcatgaaggggctggggatagtgggtgtcactctgtagacagacaaggaagggaagaagagaaggctccagatggaaaggaggggatagaccagcaggagcggctctgcttggcccggtcctgcctcctttaatggtccctgggcctcttctgctctgtgtcacctgcagccaactgggaaggagcttccagacagccagctcgttcagcccctggtctacatggagcgcctggaactcatcagaaacgtctgcagggatgatgccctgaagaatctctcgcacactcctgtctccaagtttgtcctggaccgaatatttgtctgtgacaagcacaagattcttttctgccagactcccaaagtgggcaacacccagtggaagaaagtgctgattgttctaaatggtgtgtgtgggtctactgaatgtccactgggaagggtcttggtggccggtgctgaggaggctggggaggacagcaaggaggagtcacaagagggctggtttgacctgaagggactggtggccgtccagacaggcctgtttttgttgtttcctgttagtgttgtgccttacaagttagtggggctcgtttagacaccgattcttttcaaaggggcacagccacagtccagctctcctcacctgtcacagcagatcctcactttaggtggctcgcccacccccaggcccccctcctttgtctcttcaggttccctgtgctgatggttatagtcacccactctgtccgacatccccagggccccacactcgcagagccaccaggaagcctcacggtcaccctctctgcagtgagaagggctcacactgtagagcctgggaggggagccctggcccggggcctggagcctctttacctgcagaccaagcgttctgtgccagcgagcaggaagaaattgtaccccatttcacactaagcatctgtgttcagaggattgagtcagcttgcttcaggaaacctgatgtttgctagggaacaaattagatcatcacaaagtaacctcatacactgcagttttgattactcactactctttttagagatgtctatttatttaaattccaattagtctgaaccgatcctaataattatgggctctgcttatgaaatttagcttcagacaggagttagttccagtcaacagcagtgggactcctgggtcagaaatcggattttggggcaccatgggtaggtggccctaaggctccatgtcctgcttgccactcctgatgctgcccacagagtcggtggtcactcctggccactgtttggccttcgcaggggttggctgggagagagaatggtggcacctcatcatctggttgtcacatataattaatgtgcttctgcagtgattggatagcatgttgggttttcagaagcagaatgaggctgcaaatcgaattgaaaacaaggaatatacaaaggctcacaaatcagccaccacagtgtgaagcagcatactttaagaagtaaacacccacttagaagggcagcatagaaatcagagtgggcttgctggatcatgtaatacagaagcgggtggtccttgtggctatcttcggtaaccactagtgcacctggatggggacaggtgcatgaatgggcccatatgtggacccacagagctggttctgtcattgtccccttgagagcagtgctccccacgcctagtttacagccatccatagcatgtaccgcagagttctggactgggctttaaacactcgggggaggaatcaataaaacagacaagactgtgtccactggtcagatggcccagggagattcttccctgccaggactccaatcttaaccctaccggattaacacaaagatggatattaaggcttacagaaacttggagaaaacctcagcatactgacagtgtatttccatttgtctgtattgagaaaagagtgaaaaacctgctcagccaccaaccctaggatggtctctgcccaagttccattcagcagcctggacctgcactggtccctgatgacagaccctggctgttggcacggccctgccttctcgacataccttgtcctcttttgactcctgtctcaaatgtatcacagctcccatagcttagtcagatttttccagcatcaaaaggtctttgctctttgccagcctgggatgctgctggggtacctgagagccactgtgggccaggggcatgtggtgcttggagagcttagcctgtctatgggatggggctgtgaagctgctgcgggcatctgttagcatgacgttccaaagtcctgcttctctggcattttcccccagtctcagagtagagtaagtgttgctggtgttaggagttctgtttgcatgcagcgatcttcctctaatggcagatttagcccagttaggtccattgccaggggtaggcactgccagcatttccactcctgctccctccccctcctccctgaaatcatcagtttcctctagttggcttatggattcccagaagcttttcttcactcgttcatcctgctggcagaagcagttgaaattcaaagacctaaacttggatattgggggtgggcttgtcatgcacacgtggggaacatgaggcccaaggtaaagatgaggtaaggacatgcccttctctaaggggcgtactggagcagccaacctgccttcctttccgtttacttcccaggagcattttcttccattgaggagatccccgaaaacgtggtgcacgaccacgagaagaacggccttcctcggctctcttccttcagtgatgcagaaattcagaagcggtgagaacagcttcctcaaaggggaggggggagtttttgtaaacctgagaagaaatttggggaaaaccccaggctgagttctgtacttggcagattgatcggaggaccacagagggctgtcggtttgcatcagtgagaggcagctaagctacaccccccattcggcgcctcaaaactctcagttccttctgagaatttccagccttaccttcacacagtccattaacatgaaggtgacatcattttgttaatagaaattagcaggcaactttgttctgctttggtaaagttttatagattgcttgctgaatatgatcttttctttataagaaagggatttggattgcagagatctcactgagtatttgattctcccagaggcattgtgcccactgctgtgggagctgcccctgcagtggttgtgtgggctgcatccagcatgggcagggtagagagacggaacccctgatcgcagcaaggacggagtccaggctgggcgcagtggctcatgcctgtaataccagcactttgggaggccgaggtgggcggatcatttgaagtcaggagttcaagacaagtgtgactgacagaaaccccgtttctactaaaaaaaaaaaaatagcccgctgtggtggcacacacgtgtagtcctagctactcaggaggctgaagcaggagaatcgcttgaaccctggaggcaagggttgcagtgagccaagatctggccaccgtactctagctggggcgacagagcaagactctgtctcaaaaaaaaaaaaaaagaagatggagtccttagctaatagatgagaaagttctcatgtagtagctctcaggtggcccaggagagcaaggctgaaaaggagtgaggatgcaaaagcagcggctcacgtcaggtcaccagctggattttgcctcctgggtctgcagccacctgccttgcatggcgcctgacctgcatggcacctgcccatccttacaacccttaccagagatgctcctggtgaggagtgtcctgctgttgccctgagcactcatggggcttttgtgagactcagtgagtgaagacacggcaaagcacagagagcagtttctggcctgtcgtaatcacaccgtgttctgtgatgtcactgttgtcatcgtctttgtcatcgtcactgctgccggccctcctccccagggccatgctctgctgccgcccgcttgcagctcacccagacctgctcctgccctctggagcgtgaagcctgactctctgttttctcttgccccccttcccctggcaatttgaattgaacttttaaaaatatgcccttaaagtaactttccctggcaccatctattcctgactcagagttcctgcccttatgattttctgcccaggaacaaaatttgtaaacattcttgaagttttgaatcattcaagtaaaacagaaggtagattaaatagatgtcttcacagtgactgcctacaatgagtactgtggccttggacaggtaaggttttccaagcctctgttttctcacctgcaaagtgtggtaataacaggattaatccacaggatcttggagtagattaagagacgtgtggaatgcattcatggcagcctcggcacgtgagggtcccatacacagtgctgcactccgctcattcttccctctcccgccccctcagctgtgacctcctgtggcatcaagttaacctcttgttcgtttttttccttagattgaaaacatacttcaagttttttattgtaagagatcccttcgaaagacttatttctgcatttaaggataaatttgttcacaatccccggtttgagccttggtacaggcatgagattgctcctggcatcatcagaaaatacaggaggaaccggacagagacccgggggatccagtttgaagatttcgtgcgctacctcggcgatccgaaccacagatggctagaccttcagtttggggaccacatcattcactgggtgacgtatgtagagctctgtgctccctgtgagataatgtacagtgtgattggacaccacgagaccctggaggacgatgccccatacatcttaaaagaggctggcattgaccacctggtgtcatacccgactatccctccgggcattaccgtgtataacagaaccaaggtggagcactatttcctgggcatcagcaaacgagacatccgacgcctgtatgcccgtttcgaaggggactttaagctctttgggtaccagaaaccagactttttgctaaactaatgcataagacctatgaattcaaatatctttattagacctggggctaaccaggtgaagatctgagcccagaaatgacccttcctccaccacacccctcctttgaggacgcccggggtctcccacaggcctgtgagttgcctcggcatatgacgcagaaccccaactgttacaacttagtttggatgtaagatgctctgaggaccctgcccacacccctgcgtgcattaggatgtcgctggcctttgctcacctcagaggggagaaaaggctaaagatttgcagtttgacagcccagcagggaggaagcatcacacagcgttaggagccgtttccttcaggtgttaaggaaggggatgcccctgaggttctcctggctagtcagggtggcttcacccatcactggtgggttgcaggaacagcacccaggactctgaggagggacagagaagcaagggggctgctgaaatcgcagagacttttgcagcatcagatctgaggagtaaaacggcacctctggccttcatcttggtgctgcgacaattgtggaggcaaagcattctttctgtgactattttgttcctgtagacagtcagcgatggccagagggtggtgtggtgtccaggggtccatctttccagaatccatgcctgtgtaatgctggtccatgcttctgaacctgtgtctgccaagcgcctatttcattcagcacaagacatacgattttagaaggtgaggggaggggaggctttttctacctgagaaggggagtgtctttgagggccttaaaaggaccatggcccaggaatgggggcgctggttgggcttggagctcaggctgctgtggatcccggcgcatcagttctgacttgccttacctgggtggacagcagtgaatctccacctgtcttctccagggagctcccatgttggggctgaagacgagcaggggcaacctgccagcatcacagaattcagtgtagtttatacatttcgattcctttcatctcagcaaaatgggcactgccagagccatttctgatcacaccaccatcctggaccatgtgactggaaggtgggtaaccaagttcaccagcaataaaacccagcgcccaggtagcctccagcagtgcggcttcctggcaacaaggtaggccctggtgcagggcaagccgcagcgaccatttcagataccgtccacagccaggaccgctgagaactgggacagtttcctgggatgagtgccagcctgagcctgcatggtgccgccgagcccggggtggaggagggagccaggcttcgcttcaaggcggcctctaccttttctcagaatggtttcctgattgtgtcaatgtgaaagttaaataaaatttatgtgccaaacctgacatgagctgcggttctgggaagggtgcctgtggccacgcgcgccccaggcaggtggggtaggcatgtgcgcacgcatgcatagctgctcagggtaagcagaccgcaggaggcccagccttcagccgccatggacacgcagggccgaggacgccacactgggttatttttctgtaacgtttagcaaagtcttgttacaatttcagaccaaatgagctgattgattacctctttgctgtttggaatctaactgtggatctgtatatgaatggaaggccttaaagctagtcttaattaaaatagtgttttccctcagaaacaaaattctggcccctggggtggtctcttcctcccctttggcatttgggtcattttcctaacatattttgccacacaagtggagattgctaccatagtatctcctggacatctcactgtgtccacagcaaggatgccgccaagcacggcagcccaccccgttcatttctgcacagccagtacccccactcccctgtcccctgacttccttctgaggctccagatccactaactccctcctcagcttacagcaggtggtgcacctccttctgccccctgaggcaccaccatgtggagggctctgctaccctgtctgggcgttcctcaggactgggctggatggtggcacagctcattcccaggcagtgacaccagggtgggggtggctggagtaggcaggcctagggggacctctgcactaacagcctgggtttgagagaaacaaacagcgaccctgcctccaagaagtgctagggcccggagggcagttcctaaattaggaagtttaataatacgaggttgacttaatgggtttgtgttttagaccgcttctctcctactggatttcactcctagcgcgtgtcaggtttattggtcttgtgttgagaaccactacagagaaatgcccagagctgagatgagatttgattttcacagtggctgactgggtgcacacgaaggtgtgcactcacggcctgcagggcacccaggtggcctctgccctgggttcctgaaaagaagagcctctgacacagcactggggggggtcctccctttcaccccccagctttctcgctctaaaccccggcatgctttgctcatctggaatctccagaagcagggaacagaaagggaaaaatcaagacagcagctaaatgtgaggcgaaggcagcctattggactaaactcaaattatgcagcatagtttcccaagctcctcggacatgccgagaccctcagcaggatagtgcagttacagggctgagcagaaccgcaggctcataggagatgagaggcctgggaagtgccaggacaaggctgcacctatccagcttgagtcaggaggcttcaggcaggtgaggtagccacacttggggagcattacagaagggttggccagaggagaggatgcccagggggatggaagctgcatccaaggtatggcgggtcggctgtgaaaaatgtgggcgcccagacaggaaggctgggcagcatcacatagggcttccaggggtgtgctcttcccctccgggaggaggggcaaacacaaggcaaccaacagctgtgatgattggggtgatagggggttgtccccaaagctgagggaggagcatgcaccagtacagactcacacccctacagcaagtagttggtgcctggaggggaagggcaggtagcttgatgtgaccaggaatggctgtgctctgcaagtttgggtgtcatttgggtaataggggctctggaggatttattttttctttttattatataaatttaaaaatatatgttggctgggtgcaatggctcactcctgaatcccagcactttgggaggccaaggcgggcagatcacctgaggttgggaattcaagaccatcctgaccaacatggaaaaaccctctctctactaaaaatacaaaattagctgggcttggtggcacatgcctgcaatcccagctacttaggagtctgagggaggagaattgcttgaacccgggaggcggaggttgcaataagccaagatctcgccattgcacttcagcctgggcaacaagagtgaaactcattctcaaaaatacatgtgtgtgtcaaagtgatcactgaactccaagtagctctcagcttcaaccgtttgtttttttgttatgtttgttttgtttttggagacggagtctcactctgtcgcccaggctggagtgcagtggtgcgatctcggctcaatacaacctctgccttctgggttcaaacaattctcgtgcctcacccccctgagtagctgggattacaggcatgtgccactatgcctggctaatttttatatttttagtagagacagggtttcgccatgttggtcaggctggtctagaactcctgagctcaggtgatccatctgcctcagcctcccaaagttctgggattgtagccatgagccaccacaccgggccccacagtttttgtataacaaattccctttctcatttcatctgccccttgccccactcacttaccgtgacttgtatggtgcacacacctgagaagctcagactggggatttgagtcccagtactttgacaccagagcccacagcattgactgccagctacattctactgactcaaatccattttttttaaccctgctgttctttggttcattgcccttcattcatctgaccaccccaccaaggcccccaacccagtgcctcccagcagcagctccccttggcttctcagcttgctctccccattcaccatggtgtctatttcaacattgtccatttttctcaaacttccactccattctcatttactgtgggcagatgaccttgtccccgacagagggaacaggtgccatcagatgagcattctccaacatactggctccacacctgcaaacttcctgtatccacacatcctctcccccttctactacagtgggcggggcttgcctcccaccttgctctgcacctccccacatctgttccgaattaccctcctgctctagtgccagctcctgtatctgcaccccttctccccactgggctctttcccggtggcattcaagcacgttcagggctctcgaatcctaagaccatcctgccttagctctttccccatcccacatggggccctgccttacctgtcacccccactccatcttgaatctagcagttttcagggcagtcagtcaattttccagattcttttcttctgtgcatcctttaatttctattgcttcccagtattcttagctcagttcttttctgtcaccactctctctgggcaaggaggcctccctgcagatcttcagttaccatctgtgtggaaataagccccatggggacccaagaacttttgtgtgttttgtccgctgtggtagcacaactctctaaaaacagtgcttggcacaaagttctcaagacttttcgaatgctgatttagacccaagtttgtgccttctgtctgcatgtctttttgagcttctgacacttataccacctgcctactaggtatttcctcctggttgccccacactcatttcaaacttattaattcctgagcagaaccttcatcttccccttcaaacctgttggtttatatgtggccatgatttcagggaacagtgacacaaaccatccaggtgtctgaaccagaaatctgagtcagaatcttggacaactccttcttattcactcctcacatccaatcagtcaccacttccagtagattcaactatttacaggtttcgggttcccggccacttctttccatcccttttgccacctctccagtatgggccactagacgtcccaggcgggccacacccacaaacacagatgcctgccctgctgctccccctgcctctgcctctgattttggccacctgcaatcatttctttcttttttttttttttttttctgagacagagttttggtcttgttgcccaggctggagtgcaatggcgcgatctcagctcactgcaacctccgcctcccaggttcaagtgattctcctgcctcagctgcctgagtagctgggattacaggcatgcgccaccacaccaccacacccggataattttgtgtttttagtagagatggggtttctccatgttggtcaggctggtcttgtactcccaacctcaggtgatccgcctgcctcggcctccgaaagtgctgggattacaggcatgaatcagcatgcctggccccacctgcaatcatttctataccccacagctagagtgggttttgtcaaataaaactctaattgtgttgctccttagctgaaactgttaaatggctccccattgctcttagaaaaaaagtccattttcttccacataaagtacaaggtctttaaggatttagactctggttcctctgcagtctcatctctcaccatctccttcactttcactccatgcccaacccataggctttggctgtagccatctattctcatctccatgagtttgccatggcctcttgtcatctccagaccttgtcacaggctgttccttgcaccccttctcttcaggtagctaactgctattcatcccttaatatccagctcagaaagcatttaggaactcttaagcccaagatgcccttccttgagatacaattcatcctggggcaaaattcctgtccatctgtgaacctatgaccagataagttacgtgcttccaaaatacaatggtgcaacaggcacagacatcctcatgccaaaagggagcaatcagaggaaagaaagggatgatgggtcccaagcagttccaaaacatagtaaagcaaatcacattagggtttatggcttaagattaatcttttttggtttgatgctctgccctccagacccactggagcagtggtctcaccttccagaaccactggggtggcaaagtcactcccatgacttggcctgttgccccacctcctatgttgcccatgctggtctcaaactcctgggctcaagcaaacctcccacctcagcctctcaaagtgctgggattacaggcatgagccaccgcgcctggcctctgctgtcgttagtgtcagctggcagtgtttctgttggtatcatcccatttctgttcctggccatctctgttgagatggctggttaggtccatgctccacacccacactaatctccttatcaaatggtaggtcagccatacccttgttctcttctgaacatgttttcttattttttgcaacatagactgagaatctcaaaatcttttggctctggttcctttttgcttaataattcagtcttcaagtcatttctctcttcttgcattttactacaaccaatcaggagaaaccaaactgcttcttcaacactacttagaaattgcttcagctaagtacttaatgtcatcacttgcaggttgtaccttccacaaaacactggaacgtcaacataagtcaggcaaatcctttgctgctgtataacaaagataacactttctgcattgtgcgatgtcattttcctcacttctgtctgcgacctcactagaatgacctttaccttccatatttctaccaacattctgttcataattatgtatatattctctaagaagatggatgctttctgtacagctctcctcttttctatttttttttttttttttttttttttgcaaaggagtcttactcagttgcccaggtggagtgcaatgacgcgagctcggctcactgcaacctctgcctcctgggttcaagcaattctccggcctcaacctcttgagtagctgggattacaggtgcccaccaccatgcctggctaatttttgtatttttagtagagacagggtttcaccatgttggccaggctggtctcgacctcctgacctcaggtgatccacctgcctcggcctcccaaagtgttgggattacaggcgtaagccaccatgcccagcctctcttttccatctgagtcctcatcagaatcacatttcatgtccatattgttagcatgcatctgaaacttctccattatctgtacatcatccgtttccaaagctgattccacattatttgttacagcagcacccacttcttggtagtaatttcttagtctacttggattgccgcaataaaatactatagactgagtggcttaaaggacagaaatttatttctcacagttctggaggctgagaagcccaagatcatggggttggcagattcagttcctggcaagggctctctttctggcttgcagtcagctaccttctcaccatgtcctcatgtggcagagaaagtgctctgatctccctcctcttataaggatactaatctgatcatgggttcctatcctcatgacctcatctaaacctaattacctctccatggccttaccttcaactaccattgcactgaggattagagtttcaacataggaattctggggcgcacaagcattcaggctataacactatgtgatcgtcagggcagggaatatttacatttgccatagcagcacccaagcctgaaaacaataggtgcttcatgaatgttgaattgacttgttatgttcatgcggatatggcattttctatctggacattcactgacctccttggctacccatatattgtataccttggcatggatgcagcaaccactgaatcttcctccccccttcccctgctgccaggattcaactagggaataagatattaactgaaactccttctaccctcaccctattccaaaaccctatcatgaacagctctcacccgcccttcctgtcccataatttgaggatggggatgaggaaaaataaaagatcattcccacagaaaagtggttgccaatttctaaatgtgtattttctttttctgggccatctcttgccttctcccttagaaaagtgccagatgtaaaacaacaataggaatttgcactttcattaatctcaaagtaacttaagtgtaagatatactttagagatctttgcacataatatcaaagctgtctatgaacattgagcagctcaactcatgtcaggccccactgctttggaaataaaagacatgggaatctcatctcgagccagccaagttggccgtgctccaccttaagacctggaggcccagtgagttcctccaggcccagaggttctaaaggaagaggtagctatgcctgcaagctaagccggaatggaatgggctgagcataaccagaaagaagaaagtatggccacctgtctccacactggtcctggtaataaaatttgtctacatgtagaggttagaaatggtgctttgtggctggatgagaatgcgctttaataagcattcattcaaggacttcatagaaaacccactgagaacccaggtgctaaggaaggaaaagagaattccttttaccttcctcctagatcccttatgcaagaaatagacttggagcatctggcttccaggccctttggttctacactaatacatttactccattttgtaaattcagaactagtacccatgaccctacacgaataagtgaatgggctctgggccttgcgtttttcagaaagtgaattgccctcaaaccctcagttttcaccaagatgttgataaggaatgacaggttaaagtatttgctcagtactcaagtttgaaagtaaaaactagcgtaggacagaatgtaccaagttaaccaccagggaagtggatcctgtcctgttatccaggaccaggttttattaaatgattcatagaatcagatccatttattccaagtagactggaaatactcgtgtcctgatcctttttgtatggttgaaaccacttcattagacatgttgcaatagtaaaaagcccgattagcttagtgtttactcattttatttctcagttatttaatattttgttttccttaatatccatgatgtttgtctctggtgttctgatgtaaaatcatagtgtgtattttttacactaatgttgaaatctgaaatatatgcacccatctttaattttgcgtgatgtgttttacgtgctattcctttctcagtgacagaaatgaacagaccagaatttgtgggatttgggtacaggatctccataagctgagaatgcccctcttgctgttgctgccagactttcggaggctctgtggctgagccccagactccttactgtttggacactgacgtgggctctggcctctgcattttccagaaccccagagagacctggaaagtcatcctcagcctccattcctggtcacagatgataatgtagaactggccttagctgtctttcctgggctctggctttctgccaccttggactttgctactttctgtaggacttagtagcacctgccatactctgccactccctcccctctaggctgagccctgtctcacagactctgaacaatacgaggcttttgctgcccaaagtttgtcatgattgatttaaactagcatgccaaaaataaattcctaaaagtcagtaagtcaacttaataactgtgaagttcagttatcaaaaacttatattatttttagggacaaaatcttaataacctggaaagatagatttttttaaaattagtttttgttcttcagcttaactgacacgtaatttacaaaacataaattttaccttttataagtatgcagttctatgttttagtaaatgtacttttgcgactattactacaatctagttttagaacacatttgttacccaaaaaatctcctaaatacccatttgaggtccagctttaggcccaggcaaccactcttcttcctcctgtttctgtttttgcctttattagaaatttcacataaatgaattaatatgatgtataaattcttgagtatggcttttttcccttagtatagtcttttagatccatccgtattgctgcatgtatcaatatttagttcatagactgggcgcggtggatcacacctgtaatcccagcactttgggaggccaaggtgggtggatcattgaggtcaggagttcaagaccagcctggccaacatgatgaaaccccgtctctactaaaaatacaaaaattagccaggcatggtggcaggcacctgtaatcccagctacttgggaggctgaggcaggataattgtctgaacccaggaggcagaggttgtggtaagccaacatcacaccactgcacttcagcctaggtaacagagtgagatcctgtctcaaaaaaaaaaaaaaaaagaaaaaaaaaaagaaattagttcatttttactgctgtgggaattccattatatggagataccaattttatctattcaccatttgatgaacatttgggttgtttcccaggtttggctcttatgaataatgctgctatgaacacttgcatacaagacttggtgtaggtatatgtttccacttccatgggatacctaggcatggaattgccggtaataaatatgtttttttctaatgaaaagaaaatcaatgttatggcttttccaaagggcaaaactaggctgaacttccatgttacagagagaataaaactaaagaattagccataggcaaattgcactgataaattatctgaaaactaaaaggttaattataaaaataacagcaacatattttctagtctacagttgatccttaaatattagtaattatggccgggtgtggtggttcacgcctgtaatcccagcactttgggaagccgaggcaggtggataacctgaggtcaggagttcgcgaccagcctggccaacatggcgaaaccccatcgctactaaaaataaaataacataaaaattagccgggcatggtggcatgtgcctgtaatctcagctacttgggaggctgaggcaggagaatcacttgaacccaggaggcggaggttgcagtgagcggagattgcaccactgcacaccagcctgggcgacagaacgagactccgtctcaaagaaaaaaatatatatgtacatattagacaattatgatcaaaagctgtagacttctagaccagagtctagaagggtgtggccatgcttgccctgggcagccccatgacagctgatgtggaaagcgggaagaggctgacaatccttctccccagcatgtctgcatgaagccttgtgattcactttcaccaagtacctgatgtttcacaattccagcattcccgttaatgttacctcccattgatcctaaaaagaggcaaatatgaagatgtatataattttggataaatcaaaggtggttcctgaggaggaaagtgtccagaacctctgatctgcatagtattttacacacttccaagcataagaagatgaacagaatggcagaagtgagagtacccattttacagtgaggggcatcaaagaacaggaagtgcaacaaatgagggaggttcttgggctaccattcaaagctatccacttggaagtttctctgccagtttcatttccccatgttcctccagggggcgctgtttcctattctagctcctgctaaagccaggttccctttctgtaaactcacttggggaaactcaccaaggtactctccgaagctacaatcatgacagttacaaaacaccgctgttcggagattaggcctaggacatacgtggtcagatttttctctgttgaagagcaggtagagaatgggaaaacaagtgtacagaaatcaccaaaaatctcagagctgcgggaacagaaattttgtctgttttattaaatcataagttcaaaaacaatgcaaagcttccctccctagaagataattcctagtaaaaggctgctaaaacccacagggttttgttggtggtggtggtggtggtgttagtgatttgtttgaaatctggaacgccttgctttggtctttgtatggtttcaccatgattttacccatcctggagcctgccccagcaatacttgggacaagtcacactaactatgtatgtcttcctctgaaaggaatggtgacctgtggtgggcccagagcagccgttccagttacaaaggggtatcttcacctgcagtgaagaaagcaactctcagccacaggggtgttagccgaccttggcctgaatagaggctcctcagggctttggagggagttttagaaaaagaggcctctcagtgcctggcagagttgtgctcatcagcttcaacaaaacccatctaactaaatgcagggagcatttgtgagcaatttttctattcaatgattgctcaaagttgcagattattctccagatgatgttcttgcttgataagaacccagcaaacagtaaaatcaagatattcagaaaaagctttatatgtgtgtgtacgtgtatatacataccatataactcaggttggtttcagtaagcctacagctatagcttccgttcttggcaaagatatataaagtgtattctttgcttttatgtaatgcagcagggtttttcttcctttaaaagccttctgctccacacattgactgctttcttgcttcccatgttatcgtgtacacacttcactgacaaccttcagcctgtatcacctgagatatgtttctcctgcacaaagacacagcatcctgctgattctgtctttgtggtattaatggcagatggctttaaaaatgcttgtgggggtcaggtgcagtggctcacacctgtaatcccagcactttgggatgcagaggtgggatgctgaggtggatcacttgaggtcaggagttcaagaccagcttggccagcatggcgaaaccctgtctctactaaaaatactaaaaattagctggacatggtggcaggcacctgtaatcccagctacttgggaggctgaggcaggagaatcgcttgagcccaggaggcggaggttgcaatgagccaagatcgcaccactgcactccagcctgggtgacaattacttgtgggaatctgcatgtgaacgtacctggctgggaacaccctggcagatacagtcatttaatgccaggaataaagggcaggaaggtgtatagtgagagaatctgagaaatgggcaccaggtgtggaaagagctgtaatgtgaagtagaaatgggtaggcttgctttatgtctttaatttctttcttttttttttcttttttgagacagagtctcgctctgtctcccaggctggagtgcagtggcgcaatcctgcctcactgcaacctccgcctcccgggttcaagcaattctcctgcctcagcctacctggtagctaggactgcaggcgcacaccaccatgcccagctaatttttgtatttttagtagagacagggtttcaccatgttggacagggtggtctccatctcttgaccttgtgatccacccacctcggcctcccaaagtgtgggactacagacatgaaccaccatgcccagcctatgtctaatttctttttagcctgcttcctgctttttttttttttttgccacatgattctggagaatgccaaccgatatctacgagatctgtgaaactgagttatacatataagaactactttgtgaagaagatttaccaggacacatgcaaaggatttggtgcgagaaatttccattgtaatgctgtacatgctcaggttcagggacttctaagagggaaaaaaaggccacagagctgttgtccaatcaatagcctcattaccactcaaccaataactccattaacactaatgatggcttgtttccactcctggcaacaaggtctgtacttgtagaatgactaatggccacttcatacagaaatccacgccatctcctgttcaatgtgcatctgtgtcccaggcaggtgggatgttgttcatagtttatttttatacgctttgaatcatgtaaatctgggcctgatggtgaaaacttgtctgccaagggccagtatgtaacgacagtgatcgtgatgttaactgtggtggcccgtgttcatagcaccatcccacagggactcctcatccatcatttggctttaatgttcagccagtcctgctcatttgggaatcagcatgtcttcttgatgtaatggtaggtaagtttgattgtgaaaatgaggaacgggcgtgctcagtgcttgccgaggggctggcaccgagtctactaggtagaacaggggtttctacacctaaaacatgtcattgcggttcttttgctgtcttggcatatgattaattacttcacctttgtgtgttccttagtacttttcagtagacacaataatgccagctaccatcctgggatataatgctataaaaactaactatagttccttgaatgtttgtgtttaggaggtgatacaggctaaaaatgtgcttaagatcaagaagatcttagatgctatagtaaataataaagtatagaatttaatgatgagagtagaatattttggttttacacagcactttgaggttgataaatggacactaccaggctctctttcagaaggatacactgcatagagcatcatccctgtcatcatcaccatcaaataacacccctttgtagggcttaataatatatgatctgcaaagagctaataatctagtgataggaactctctggcccttaagaatgtacattctaaaatcaactaatcatttagtatatcctcttggtaaatgagaaaaatgtaaatttaagcaaacataattgtggagaagttggacctcttgtaggaagtcatttcaggatgctcttctcatttagttgagaatctcgatgtgttgggtgagcaaagagctgatttcactgaggacgccaagagcactgaatgtgccacataagagagggagaaacagaaagaggtaggctttaagggggtaaggtgaaaccagttgacaactgtgctgccagataagcagtaataatattacttttatttctattgtttaagtaacattggtataagtacctattttaccaatttaagaaagttagttcactatttcagtgttagaacaacatgtagtttataactaaaagcaccttgaaattagtatagatataaagattagatcaaaggggctggctgagcacacccacctacctctccttccctttgctttcattatttctttgcaactttcttcttgcccacctacccaggcaacaagtcctcctccttcccctaaaacactggggacaggagacagcaaacaagaacagcagctaccaacaagcgaacagggaatctcagacctaataatgagtgatgcgcaatcaagaaacatcagacacttgggggcaaagcagcacagtgaagcagaaagaacattccctagcaatagcagaagaatgtctttctgtgaaatttagatttgcaaaatctgaacaccttggaattgttgcaggtgaacatcatgccgtggccagggtagatgggccccgaacagaaataacacttctcaacaagcatgttgaacccgtatgggtccccactgaccaaaggccaaacttgagaggaagtgaccgaatacctttctagtaaagcaaattaatagcaatgctgttagtgccaggaaaagaaaaagggtcatcaattgaaggcaaattttaggtaatccctgcgaaacagaaaacagacagaatatgattaatgaagacaatgatagcctcaaacccagaaagggctgtggcagcaaaagagtggccactactctgggaatgttccaagttcggggacattggacacagggagcagcagggaacctgggaaacctgaaaagcgattgggtcgagaacgacattcagagttcccagttaggtctggccctttgccaagcttgtgccaagtaggtaacagcagaggtgtttgccctcagctcaaagtaatgagtggatgtgccccagggctggagattccacatagctcaaggggaacagggaggctgggcgcggtggctcacgcctctaatcccagcactttgggaggccaaggtgggtggatcatttgaggtcaggagcttgagaccagtctgaccaacatggtgaaactccacccctactaaaaatacaaaaattagctgaatgtggtggcacatgcctgtactcccagctacttgcgaggctgaggcaggagactcacttgaacccgggaggcggaggttgcagtgagccaagattgcaccactgcactctagcctggggaacagagcgagattctgtctcaaaaaaaaaagaaaagaaaagaaaaaaagaggaacagggagcctcggactcaggagatgagctgctacacaccttcctcccaaagagacatgcctcctccttcccctcaaacactggaggcagggcactgcaaagagacagcagttaatgacatgggagcagggaacctcaaacctcacaaccaaggagcatgagacacttgaggggaaacagcaccataaacaggggcagcaaggcccacaaggaacctacaggaggaaggaacctacaggaggaagcatcataaacagagcagacagaataggacaattacaagaagtatcactaaccatagttttcaaccaattttttaaattaatttatttattttttattatactttaagttctagggtacatgtgcacaacatgcaggtttgttacatatgtatacatgtgccatgttggtgtgctgcacccattaactcatcatttatattaggtatatctcctaatgctatccctccccctcctcccaccccacaacaggccccggtgtgtgatgttccccaccctgtgtccaagtgttctcattgattttgaaccagtttttgaaaaccagaaagatgaaattctcttgtccttcttttgtctcatttgagcacaggattatactgggctcctaatgagctggagctggttagcatcacctgcctgtccccccaccccttttttttctgtgccctggaacagtttgcataagctatgagttatttgttccttggaggttttagaaaatacaccccaaaccaccatatgggccttgaacctttggcagacagaatacctcttcaaatgttatttcatttttttctatggttgttggtttgcataagctttctactccactttggaccaactttggaacttttataatcctgtgagttgcctatgtcatctaagcttgcaaattcaatgaagtaaagaaatattaatttctaattttaaaaaactcttttgtatctgtagttaagcctcctttcattgcttctgtttttcattactgtcttctttctggtttttgtcttaattatacttctaaatatttgtctatgatgttggtcttctcaaatgttggtcttatgatgttggtcttttgaattatttttatttttttgagacggagtctcacttcgtcactcagcctggaatgctgtagcataatttcggctcactgcaacctccacctcccgggttcaagcaattcccctgcttcagcctcctgagtagctgggactacaggtgcccgccaccatgcccggctaatttttgtatttttagtagagacagggtttcatcatgttggccaggctggtcttgaactcctgacctcatgtgatctgcccgccttggcctcccaaagtgttgggattacaggcattagccaccgcgcccagcgctttcgacttttattagtcaaatctactgttttattttattttctattattaatttttgttcattcctttatgattactttagtccactttctttaagtttattttcttgctttttttttctttttttttccctgagagaaattttaaaatttttaaaattttcttcaaggctctaatttttctctcagcacagtctttgagttgtaggtctttttgctgtctagtcctaaagaattttgactttgacattctttttagatgtatttttaaaaatacctttaacataaatatgtatagttgctagaaattcgtattttgtttgcttgttaagtccttttaatgattaccatatcactaaactgtggtagtgaattcagactgtagacaaaatttttaattttttgttgagcgttccttcgtggattagggaaatgtcaaattgtttgaaaagtgcttttgtgaaaataattttataatatctctattacagagatatatttcatatatcatacaatttatcaatttaaatggttttgagtataattggtatgtgcacctgtctacctagtcaattttagaacatttctatcaagccaaaaagaagcaccatactctttcactattatcctctgtttcttccccaccttttccctcaccgagaaatgactaatttactttctgtctctatagatttgcttattctggacattttatataaataagatcatataacgtgatattttatgtctggcttttatgactaagtgtaagtgttcaaagtgttcatccatgttgtagcatgtagcaatcaacatcaaatagaagtggtaagatacgacattccttccttgttcctgattttagggagacagcatccagtctttcaccataaagtatgatgttaattacgaactttttgtagatgccctttgtcagatggaggaagttccatagctagtttgtttagtgctttttatcataagatgctgtcagattttatcacatgatttctctgcatcaattgagataatcaatggttttctcctttcttctactaatttggcatattaatttaatggatgttccagtgtttaaaaaaacactgtgtgcctgcgaaaattcccccttggtgatgatatataatcctttttatacaactctggattcagtttttcaatattttgttgaggatttttatgtctatattcataagaaatagtggtctatcaatttctcatgatgtctttggttttggtatcacggaagcaattgcctcatagaatgagttgggaagtgttttccctttttctaaatgttttggaagagtttgttaataattggaattaattcttctttaaatgtttggttaaattcactagtgaatccatctggtcctgtggttatctttgtagagagttctttattactaattcaacctcttttctattggtctgttcagattgtctatttgttatcagtttttgtagtttatgagtttataatgaatttgtccatttcatctaaattatccatttattgacacacaaattatatttctttataatcttttctatttctgtgatgtccttttttatttctgagtctagtattttttgtcttccttcttttttttcttggcaattctagttaaagctttgacaactttgttcatactaacttcattccagtgagatataaaaatgtcactgctatagctctattcacttcctcactttctggggcattatttttatacataaactaatgttaaacatgtaacactacattttaataattattatttttataattttatgtattttaaaggagctgttatgggttgaattatgttcccccaaaagatatgtactaagcctcagaacctcagaatatgaccttatttggaaatgggcttattgtaaacatagttagttaagatgagataattttggagtagggtaggcccttaacccaatatgagtcgtgtctttacaagaagaggagtgagaaagacataaaaaggagaatgccatgtgaagacacagagacacacaaggagaagaaaagcacagggaaggcagactggagtgatgcatctacctggtaaggaatgtcaaagattgctgaacaccagaagctaagagagaagcatggaacagattgtcccccagaaacctgcaggaggactcaaccttgctaccaccttgatttcagacttgtagcctccagagctgtgagaggattagcttacattgtttcaagccacttagttttgtgataatttgttgtggcaaccccagaaaactaatacagaagttaaggaaggaaagaaaaaaagtaagtatatatgtgtagcttttgttatttcagtcttcttatttattatgtctggctctctttatttgcctggatttgagttgctagctggagtcattttctcagccaaatacactttttctctcatccacttgtgctgttattggcatatatttctatatattatagacccctcataacacatcatatacatatacacacatgtatataatttctaacttatgtatataatttatatcatatatacacacatatatagttttatacaattactttgtaaaacagttaagggaataaaagagaagaaatatgcatttatactgtatgttataattacatgattatgtttcctggtggtctgtgctttatcatggggattgaagttactgtctgggataatttgttttcagcctgaagaatttctttagtgttttctgtaaggcagctctgccaataacaaatactctccttttttgcttatctatgagatatttgcctgcattttcaaaaaaaaaaagctctatttgcctgcatttttgaaaaatagctttgctgaatatagggttttttgttgacagttttttttttttttttttttttgcttactttgagcactttgactatattatcctaatgccttctggctctcattgtttgtactgaagtcagtggataatcttataagagtttccttgtgagtttccttgaaggttcccactcagaagctggacgtcctgcttgagatattcttgaaagaatatctcaaatggaaaacttaatattttacagtgcttaaattgttatctatagagcagttaaggggaacgataatcttataacaggatctgcatgattcttggacagtgattgtttttttttttttctggctgctttcaagatgttctcactgtctttggctttcagcatttttatggtgatgtatctatttgtgaatatctttgcatttatcctatttgaggtccatcgagcttcctagttgtgtagattaatgatttttcatcaaatttgggga

SEQ ID NO: 10 - DNA, 45770 bp, Homo sapiens
  allele (1)..(45770): CHST10 Variant Allele (rs17024129)
tgaggcggtgccggcgttctggcccccaaagccggtctagcgcgccgggcgtcttccttacttccgctgccgccgccgccacatcccgggacccgacgggccgcggcgcggaggcctcggggcaaggtggggcgggcctcccgagctcccaggaccccgcgcgcttcgcccacaggcccggcgaagcccgacccgcgcggcgcccccagggccaggggaggagcctaaggacccggacgagcgccgctccagtagggtgagctcggggacgcgcaggcgggtgggtttcagcgcctgggcccctctccccgccgcggggcgcacggaaaaaccggggaacccgcgggttttgtcctggcgagccacatcccggtgtgttttggcgacttgaagacctccctagttcgcgggagtagcgggaagagccttcctcgcgttaattatgcaataagaaggcgtccttgtgcgggatgctgtgacccgcggaattattgatattgtgcgagcctacaatttacttctttcatccttggctgagaatttgcgtttgtaattgtagatggagagaggaagaaagggttcagcttgggtccaaggagcatgcagaggaaggcagggaagaaggagcatgtgcagcttcggtgcgaggggagtcaggggtgggaatgcacgttccctgcctgaggggccccggggtgccctgagcctctgatcttcgctgtcaggaggcctgtccgaagttggaggttgaggcatgcagttctgcacttctggctgggaaggtgaaccaggttttccaaaatgtcatttttgctttccaagtctgcaaggcaggaaagggttgggcagtgaatggaaagtagtgcagccaggttctggttagctcagcggcaggactgtcataacggtgggtttttgttgttgttgttgttgttgttgttttgtctgaaaaccagagtctggggctttgggccatgaggagttgggttattgcattgcttagagtgccagagtgagaaatgtctcagacgctgttaaaattaggcagctcagtttagctctggctctctgataaccaaccacctcctccttcactcttttcagtgactgggttaaaatgaaaagacacaaagagagaagtggtcttttcccttccctccccattataattaagagcttagtccatcttggctcagaattggaattcagaattcagaattgctcttgaccctgaagaatagaatctcaaagaaatacctgagcagaaaattctcttcttcgctgaaatgaaaattggagtgtttgcaaaactgaacaaagaaaggaaagaatttgtaaacatcacaggcaacttgcagttatattcggatcatttttcagtgtttgaggagttcatacaataaaaaggtgagagagagccaggaatagaaacaggggagagaggtggttgcaggaccttagagattgcagaaacccaggagttcattttcttttcatacacttctggataacctggatgtgaggaccatcaaatgccgtacatgatgtttctaacaatgatggaccacatatacaacagtggtcccataagactatactaccttatttttactctaccttttctaattttagatacacaaatacttaccattgtattacagatgcttacagtattcagtacagtaacagcagtacaagttagtagcccgggagcaatagatgattccatatagcctaggtgtgtggtcagctgtaccatatagcctaggtgtgtggttagctgtactatctaggtttatgtaagaacgctctgatgtttgcagaagaacatcgcctaacgatacatttctcagaaggtatccctattgttaagtgatgaatgactgtatataaagcttaatctttcaatcaacataataggaaattgcttttaattttagcattgagttcttagagtaaagggaggcagagagagaccgtgctgcatgtgtcccagtcagcttgggctttattgtatgttaaatgagttgtatgtttattttggtagatctcctaaatccatgatctaattccatgactttggcttgtttctggttttttatgatatggcatttggctaaaattttccaggtgctaaaggtgtaaggagtacgaaaatccagagaacattttgcattggaagaattgatcatcttgtataggaatcctataactatttcaaacatacgaaacaggcataattggatttgattatttttgctacaaaaaatgtttcatttttcacactaagttacatggaagagtcttttaaacagctagtggttttggtacatttagaatattcatttaccaagaaatccaaatataacctgcctttgtaagagacccattctgccaaatatatttgaatcatcaaaatggttcactatttccttcctaagtataaaccaagttgtattaagtaagttgatcttgtaacttttaataatgcttttttttttttaattttcctatccagtgacaagaggaaccaagaacctcagttcaggggaaacacagcaaggaaatgtgagccccaggctgcagaaggtacgtgaaggagaatgtgagctcatcagttatttgagcatgccattcagtattgttcctgccttttttcttgcctgtgcagattgtaaactcttgattaggagtatgtaaatgtgtgcttagaaacgtttccttaaatataataataggagcatgctctgaggctgggattatgtgagttagtacctgctgagacctgtgcttggtacagagtgaaccccatacaggtgtttactgtatattattattattgttcatgaaaacctgtcttaactacaggtgtatttctcactggacagttaagagtgttttcattctcctaactaagggtggttaatcgttccaaggcggtaaattgtaaggatgacaacagagaagacaaaggaaatttctgtacgcagattgagagaaacctttactatgaatttgaaagtctcagtgacatgcaatagaactttatagtataaattcatatgccacactttgcattatggagttgtaatttaatgattctattgatagggtaatgcattgtagttcagaatgtgctcagggttgatggtgaaatgtccccgtttctgcagccctggtctgtctagttctcatctcacctgtcatcctcctggggttaccagttccttgtacattaccaggtttttgtgtgtgtgtgtgtgtgtgaagtttcctttagagtctggctgtgttttaaaagttgagccctggacatgtgatccctggtatgtgtatgaggtgaggttgtcagtaaagggccattgacaggcctcctcatctgacccacccctgtccctgcttgcccactctgcatgaggaacactggccttcttgccacttttggaattctgggacccagaccacagtctttgcccaggggtctgcatggcttgctcccacaatctgtcctgccttttctcaacatcctgcccatgcccttgtttattagccactgcacctgtcacctggcttgatcatatacattgatcacttgatttgtttatggcccgtctatgtctgttagtaggaagcactgtgagagcagggaatgtgtgttgctatatccccagggcctagaacagccccggctcagaggagggctttggtaaatattgctgaatgaaaaaatgtctggaaaaagcctggttaagcagagttaagtgggcttatttaccatgggacttttcagaaactttagtaagtgaatgcgcatattaaaagtggggcctggcaggtgggaggcaaactcatcagcagagtaagaaaggcgctgtgcttctggatgacaactcagacatggggaaaagctgctggcgggaatggtattggcagctgagcaaaatgaatttacaagtttccttttcaaaatgcaggggaggaaggatttgcatcaagagatggtaatagtaacatttccattgttagttattacaaacatgtacaatgtgtgctatttatcttttatttaaggtggggaagggggaagattagggcttcttgtagattcttccttccctgaccctgctttccccataaggccttaagttcttcagctgccagttcatccttgtgggttgaactgaggaaccaaaccctctggcttggtttcagatcctgacatcttgacttgtgaaaatcccatttaatgactggaagtaggaaagctctgaagatggatatgcagattctaggggtcaggaggctctgttcagggcctgcgccatgaccgaagggagggcgtgtaggggctcaggttctgctcccaccattagctctagaggcactctgagagttgtcttggctccttgaacaaaggggagttaattacagaaaatgccaggctttttaaaggccatttgtcccctagctgtagggagagcagcagcccttggcagagccctgaggaaagactctttatgtcaggccgcagtcctcttgtagacagaaataatgagccttggtggtgtcatcctcagataggaggcaaaccccatggtgaaattctgtattcaaggaaacaatgcagagaatggggcggacttagaggagctggggtgaagtgaatttggaatgcctctcttttaaaaaaaaatggggcagagttttgtgttgttttccaaagtcagacaaagcctgattctacagagtctagttaaccgtagatgggagggctgtaaaggagagtaagatgaaggcagtgatggaaggtcttagattctaattaaacctcttttagctgtgtatttggaacacttgtaattcagagcatcaatagactctcgttgactagatgcttttttgctgccaattttccttcttaagatggaaggaggtggtgggagaatggcgtttatgccagaatgcctagagtctgcattttaacaagatccccagggggattcatgtaggcattaaaatttaagaaggggtgaggtcctggaccagcaattctcagtcccagctgctcattagagtcacgaacagagctcttaaaaaatgcctgggtactgcctccagagatttgtgttgtcttggctggggtattcttggggcccggggtatcactgtatttcttggaagtttcccaggtaccgccccagacataaagccagacaccttcaggtagatgtctagattcagaaggcacataatcccgaagcaaatgacaccatgcttagctgggcacaccactctttaggattcatcaaaacccaccacaccagataatgtggatcctcgtagctcatccgctggcttctagagccacagccagagatgatgggatgtggagcacccaaccggggttgcttgtgccgggttagaattctccctcctccatgaatgaaaatgaccttgagactgggcagtggctgagtgggcatttgctttttgtacctctgactctgctgctgaagaaactgtttcaaaatttaaatcagatcatgacatcaccacccctcttttcatgtaaaactctcttcaggggctcccattgcttgcaaagaaaagaccataatagccctggcaggccccatgttgtctggcctgcatctgcctcagcctgtgccccagaactccagccacatgggcctgcgtttagttactcaggggcccattcccttggcctggaaccctgcccttcaccttaggtaactgtgctgtcccagaccactctgcccaaggcacatcccattgtattttctccccacagcaccatgtccctctcacaccatcaagtaccactcctcagatagcttctttccttcgtgtgggcctgttagacgacaagctctgtaaggacaagaactgtgtgtgtttagttagggactcagggtcatatccttggcagctgttttactgcatgaatgaatacactggatactggataatgaataatgagcttgaagtcattatttttaggttattttgtccttaaacttgtatgcacatacacacctactcatgtttgagtgctgtattttgtaaactgtagagatattggacctgagggaagtgggtattttgagagagtactgggctgtagtcttactggttctgattggctcatgtaggatgtgacttgtagaacaagtcccagttttctaaatttttaactaggccgggtgtggtggctcacgcctataatcccagcactttgagagtccaaggcaggtggatcacttgaggtcaggagttcaagaccagcctggccaacatggtgaaaccccatctctactaaaaatataaaaattttccaggtgtggcgtgcctgtaatcacagccactcaggaggctgaggcaggagaatcgcttgaacccaggaggtgcaggatgcagtgagccaagattgcaccactgcactccagccggggtgacagagagacacactgcctcaaaaaaaaaaaaaaaaaagaaaaaatgcttattacaaatatttaaaatatgaattgtataaagtacaaaaagagctcttactgtcctctcatgattttattctatgtattacatatatgtgtctatgtttgtatatgtgtgtaatcatatatatttcacacatacatgatttttttaacaaatgggatcatacattccatcctgcaacttgtcttttttgtttactggtatatcttgacactttggatatggatctatgtcattggcttgcctttcatcatagagttttatttgaaatgaaaatgtttttggacttcggcatgatttcctaaaccccccaatcaatgtgttttaagtagtaagtgtatttgaatgcatatacatgctgtggcttagatcattttgttttcaaataatactgaagtcctcatagcatttggttgttttctagtctcagttaatggatattaaacatagaactgctctgtggagactagagaaatattttgaggttgaaagggggcctcattcttgaaaaagcctggagaccctcagggagagggttgggcaggctgcctcctgaagtacctttccacattcctgagttctagtaagttgctcaattgacacagtcattcagcaaatagcaattgttggctcatggtgcgccaggcactgtgctggtccctgctgtcctgaccagcatgagcccatattctgcaaggagagcaaatggcacatagcgagagcatctggactgtgctgggtgtagtggaggaagtggagcaaggtcaggtggcgcagagcggtgctgggggtgccacctgggtggtgatgaggcagagctgactcttcctctgctgcccatgggaaagggagcaggccctgcttaccccgagtgtacaagaagcccagtggccgggagcagctcctcagagagctccctcctggaccccgcagtgactgcccacaggctctgtggcctgcaaggggctctacagccagatatgggcatgctggcaggcagctgtgcttgaaatgctgataggggcctggggtgtaatgctcttctcaagagagtggttttggcagggctagggttttgcccctgaagctttgcaaatccacatcccccactggagtctccacgtgtcctggtaccatcccggggacaagaagcagggaaaaagcaggggaaggaggtgggaaccctgcagtccacccttctcctatcctaatggagtggccagggaagggactctctgtatatcttagtttagtaagagtttgcagaagtcaagttaaaaatggattttttgaaaatgaaatacccatgtgaaagaacacattggatgatacatggtcagttgcatgattgttgagaaggtcttctgactgatgagtgtgcaggtagctgtttgttcctgtggatgaaaaatgggagcccgaagagctcttcattgacacacccacagccacctagctagggagagggtgagtgtagaccagtccctgacctcctgcccgggtgaaagactagctacggagacggtgagtgcagaccagtccctgaccccagcccaggtgaaagactagctagggagagggtgagtgtagaccagcccctgaccccccgcccagctgaaagaagctaagagctcctgacttttaaatgaaaatccaatacttaggaaggcacatatggcttcaggagagtgcacctctcagttttcaactcatgtagttggagaaatcctatccctaggccacctggcttcctggagaacagaagaggtgctattcattttcaggtaaggcttcattatcttcccactttacctgcagatgagctcagtgggcgaaatcatattacattccttcagaagactagttccattggaaagatttgattcttaaactataaaaacctccaaagtgctgtcctgaggccgggcgagggtgatcaggggttggaagcctggagggaatgagcagagcaggcagtggaatatgcagttcccaggtcctcccgccacatgctctgcagagtcagcgcgtcacctgcaggagggaggcagtgcctcttatcgttgttccctttttcatagcactgatcctaggagagggtgggttgcaagccccaggacactcagagccaggacctgtctgtttagaattgcatgcaacctgcgtggtacatcctgttccttttactccctccccaacccaccctggtgcctctgctgcttggttagaaatggcctgcagctggcatttttcaggggggtgctctcactgtgacccatgaggatggacccccctgagtgcactgtcttagagggctgagctcagtggacttggtactgctgggccctgcatcctctggccacagtctaagcctcagtttcttgaagggaagttagcagttgctggaataagagtgtgtcttgtttttttctctcttcttggtgtagaccctactgtcgcattaatttctggcaaccacactgagaaaggtgtagattaagctggaaaatcacgaagagtgccaagggattggtcagtttttactgggggtctgcaccaggccaggtgggtgctggttttttgtctacattgtctcatttaatcctcatggccactctgaggtagtggtaggaggagggccttctattagagatgggacattgaggcttagagaggttaagtgacttatggagtcacagagctaatgggtgtgagcagggatttgaaccaagtctggggttctttgtgcctcactatctctgacatggagtggcggaaggaggaggggattgtgggatggagacaggagacaggacagctggcttgcaaggaatttggcatgcccctgctgggtggtgttgctgataaactacagtacactcggttaaatgtgaagttcagaaaacaacacataggtttttgtttttgtttttttttagtataagtatatgtaatatttgggacatactttatactaaaaaaattaactgaaattaaatctaactgggtatcctgtgtttttatttgttcaacccgacttggggaacctgggaaggacactgggcctcatatctgggcacaaaaaatactggttttgggggggagtataagtatgtcttatgcaatatttgggttatacttacactaaaattttatgttatctgaaattcaatcttaacttgggggatgtcctgtatttttatttgtctaatcaggcaaccctattggtgaccccaggaaacacacgaagccttatacacgggcacctgagggtggtttgcgagccatccggagaaaacccaggcagcttggcaggtggtgagctccccactgcaggctgtattcaggtgtggccggataactacgtggtgggtgtgtcatggatcctatttgcattccagatgcctggttcctgtgagattctaggatgtaaatgttgagacaaggagagtgattcacctgggtcttcatggagctctgacccacccagggttaggaggctctctctgaaattatttgccatcagcactgtgttgaggggaccacttctccctgccatgcagaagtgatggatggcctcagtcagtcggtggaagccagctcagcccagggtcttgtctgtacgtggagagctttggcttgaagaagcactgtgttaaaggtgaaatgaaacacactttcttgtgtcacctgccaagaactgacagtgacttcccagttctttatgtgcctcctgcaggagagtgtggcttctgtgccaggctgaggaccgacatgccccgtgttgctccctggctgtgacagcatgaaaaacacccacctcagtgttctacccaggccgctgctggcaagtgggcggaggcgagaagcgtcagtgttcattcctttgcttttttagagcttctctaggtgtggctacatcttgtcagccagtcagaattttaaacacagccagctcctaattgccccagcatggcttctgcccactatgaatgaccctcagctaaggcctagtccttggcaggcctcttcctgccacctgcttccagaccatcgtgggagctcactgggaccttagcctgggcccaacaggagtcagggatcaaatgtgcaaaggagtcttattctgtgttctgagaacacaaggaagtggtcttctctcattatcatgtctctccattagggtgttctaaatttgattttattattgaatcaatcatttatattattaattcaatatgaaatgttaaatgccaagtcaaactacctattgtagcagtggaaaaaaacggaaatatttgtgctgatacttactgactgaaatcacctgtcgttttcattcctctttgttgacttgatgtatttgtaagcagcaggggcatctcgcttgtgttttccaggaagagtcagtgaatggctgcggtgtgacaacatgcaccaccagtggcttctgctggccgcatgcttttgggtgattttcatgttcatggtggctagcaagttcatcacgttgacctttaaagacccagatggtacgtatgcttcatggtggaacgaattttggctaatttagacctagctgcaacactgttcctaggtacatgcatagatgacttctgtcacagagtcaaaggactttcatgccagcagggaccttggaggtcatggcctccgttccttcatgttacagaggtgtgaggggaggtagggtgggaggggctggagggtcttttcaagcatctcctctggaggaaggaagctgctctttgtggctgaggcctgggtggtgcctaggagcaaggagcagggtctcctcccagcagcacagtggccttatgccttgcagcagggcgcctctcaggctcgcagttgggaattctctttgcctcatgtcatcatgagaggtgcagcctcaactgcttggcatgcccgtgtggtggccacatgtttgaaggtcaccctccatgcagcggaggagggtcatttaaatgtatgtcttcaggttgtcttggaggctttcttagctctcctttactgaacgtaggcattcagatgaggacggataaagagcgccaaattgggtctcagaatgctgattctacttcgtgctcttgtcatttgcttatctacatcacaatgtttcttccaccaaatggacaccctgcctgctccggcaccgcccatgattgccctgagcatggtgaggtgctctgtggtctgtggagtgctggatatgtccaaagaggtgtgtgatatgctctccagccccgaggccacttcattgagtggccaagcaggcaagcacgaggaagccagacacatggagtcattgaagtcctcatttgtgccgtggattggcccattcctttaggctgattgggagatactggggaacgtggatgagcacagcactttgctgtgctctgcaccgtactttgtcctcctgccgatggtggccttggaaaggggcagttagagatgcctctgtgccagcagttcttcctggaggctgcactgacctgtgctgtctgtgtgggacaggcccctgctccacctcacagagctcccaggcatgtccctggctgtgtcaaggactgcccgatgtcctacacctcctgccccatcctctctctgccccaccttgtctgcagagggacagcaaggttagaagggaggtctgcagggaaaagagggacaccctgaaattagcccacatggtggttctccccatgacagttgttgggccctgattggctgtcatcacatgtcctgcctcatcctccaggagccctggagagaaacctgtgaggtctgcacagcctcgggaggtgatattacacctgcaggtatctgggcaggtgtcactgagcatgacagctcacgcccgggactcggggttccgtcagcagagcaagggtcgattcttggagggttgctggaatgtgacacgatgatctcagtttgacagtttggacatttccatggcagcttcagcacagtgccatgccactgagagatccctcctgaagccctagagccgggttctcatccccgcagcacttcagaatcacctgtgggactttacagacctgctgctgcttgagacccagtgaaggagaatcactaggggtggggcccagttgagaagcacagtggtagatcctagctggagaactgaagagaaacagagctgctgagaataagaaataggtgttactcaggattctcctaaatgtcacctcctggtatggaaggcactcaaaaggcaggtcatgaggttaaattgtttatggtttattttgcttaaaaaagtaggagtagatgtaatacattttagtgagacttctataggtaatagttaaataagacttgtgcctttgtgttttactgttatctggcagaatggcctctaaagaatgccttgtttcccagcggcatctggtaaatgaggtctcattctcctttgatgtatcaagttttgtgctgaatgttttcagtgtagacactgatcctggaagctaagcaggggtaggcccggttagaaaaaaagcaagtgtaggcgcagaacagggttttgtgaagcggagaaaaggagtggtaaggagtgttaggagataaaacctatgaagaaagatgaagggctttcggattttacacctggagaggagcaccgcagcggtccttaatactgcctgtgagatctttccagccggctgccttcaggcgagtgaaagggggcactttccctgccctgtgagatctggtgtggtgtgtgggtgctgggtcactgagatgggagtgctgcccctgaccccgaggcaggggctgctggtggtgaggatgctgttggccgcacagtgtgcagtgaactcagtgagaatcttctgttgtgggcccactcccgttgcggggtgaccaccacagcactacccagcctgcctcactcgcgtgagatgttacctaattgtcccaagggacctggttaggttaggatcctgaaggtggatatccgccagctgagttctggatgcaggatgcgagctggcacccagcatcttgccagtgcacaaggacgctgggctgaagcatcaagagcatttacactcagagcctgcccctgcaggcgtcagagaggccctgggctggggtggtgtaggcctctcccctggagcctgcccttccagcactgtgctttagagagtgtgtcccggagcctggatcttgggcagcacaggaacccctctaagctcgtggccataaagggcttctcacatgttggagtttatttcacacacgttcacggtgtttttgattatgaaccagaagcccattgtgaagtgtcaagaccaggaaataacagacacggcagtgtccacggtggggagttccatttcctggaaagtgcgtggagaagccttggcctcagtgctcccgggctgctcctttcagctctgtcctctgggacagggccagcctcagaacccccatcagtggtgtgcatgttcttctcacctacctgcctttcccggtttctcctgccactggagcccctaggaagagcatggttgtcgtgagttgctgtttaaagcaacacttactttttttagtgttacagtttctgttcagctcagcagtggagccagtgatatttgtggcaatgatttatcctcagttagcaaatttcagtatcatattgaactaggatcaggtgttgtaactagactttctcataagaaaataaatccccctcagcgaagggaatgtgatggaatcatatggcaagactcaaaatgatgcccttgtggacctggtttgtgtttgtaggcgctggtttttcctctcctggttgacttcctcattggttctgagccgcttgagggcagagcctgtgatgtgaaggtctctgcagccttgaccatctttgcatgtacttatttgccatctgcggatactctccagtgaaatgtctgggtgtatcgtacctattttctaattagattggttggttttttaattgttgagtttgaggattctttatatattttagataggagtccttggtcagataagtggttcataaatattttttccctatctggagcttgtcttttcctcctcttcaaatgggctttcacagtgtagattttctctttggttgttttttaaaaagattgatggttttatgtttcacattcaggtctgtgatccactttgagttcattgttgaataaggggtgaggtttggatcaaggtttgttccgtgtgtgaatgtccaggtgccccagcaccatttgttggacagactgccctcctccgctgaatggcttttatggctttgtcaaaaggcatttgggcatctttgagagcttctatttctggggcctctgttctgtcccatccacctgtgtgccttttccttttagagaagacattcaacctctctgtcttccagtgtacagtgccaaacaggagtttctgttcctgacaaccatgccggaagtgaggaagttgccagaagagaagcacattcctgaggaactgaaggtgggcacagccaggccgtggtccttgtcctcttgaacacggcacccttgtcgcggggagctggccttcccctgtggctggttccgcttgtcatcacgtctgcgttagagccttttcctgtgttacttctccatgttagttcaccttgttaatttccatttgggagaggcacaggtcacgtctatttttgtgcccctcacagagctctgtgcatcagggctgctctgtcactgttggttgtgcagcattcctgaccagctgaacatgagccttgcctggggagccgagagtattgggcagggtcaggaggaaaccagaagtgggagaagacatctcacccagtcatggggttttagagtgaaagggggccctggacagcagaacaactaattcagcctccaaattgtatggatgagagaactgagcctagaaaaaaggtggatcctccacagtcccatggagttcctggcggagcccaaggctgctgacttccacccagcccttgctggcttgacattctggctccatggctctctgcaggcttcttgtgcacctaaattcctgatcattccctagctgggatgaggggtgcactctggaaggcctctcacttcgtaacccccattctggatctagagggttgaagttgcaattgttccagaaggaatgaaatgggtacagcgagccctaaaaatatttttagcccagaatcaagccgtagaggttgggacagctcctatccatgggtcacagtgtaaggatgataaattagaactcaataaacatagaaaacatacaccagtcagtagagtgctgctggaggttacttctcgtaggacattgatggaatggaggccaagtttacagaactctgagacagcctaaatgttgcttttaggttgaggcatcccagggtaagaaaataatttggatggggtacagaaacgaaaccaaaaaatcttatgggaaataggagagtggctttaataggatggatttaataggaaatcaaagttacatggataaaaacaaaggtagggtaagcctttggcaaagtgtcgcaacaaggttccctcaaggatgccataccctgtgaggaagagggtggtcatcttggtgctccctctccgggtggagggtgctcccggagagattgccagcctgcaggagtcattgcaaataaaaagactgcgcctgaatgtgctttacagtttgcagtgtactttactgggtttcaatctcattggtcttccgagccgccctctgaggtatatttttattctgtttgcatttgggaaacatgaggctcaaggaactgtgctcactgggtcagtatcccctggacagcaagttgtgggcctgggctttgaactcagtgtcctctgtgcccctctcttacccgctgccccagtcattctcatgagactcagatgggaggtgagggaagtgggggatgtcagaggtgatgtccgctgaggccacatgccgttaggtgacaccaaaactcagcatgtgtcttctcacaagaaaggggatttatcaacatgatcagattctgtagctcacctttaaaagtttattttggccaggtgcggtgcctcactcctgttatcccagcactttgggaggccgaggcgggcagatcacctgaggtcaggagttcaagaccagcctggctaacatggtgaaaccccatttctactaaaaaatacaaaaaaatagccaggtgtggtggcatgtgcctgtaatcccagctactcgggaggctgaggcaggagaatctcttgaacccaggaagcggaggttgcagtgagctgagatcgtgccattgcactccagcttgggcaacaagagcgaaactcggtctcagaaaaaaagtttactttgtgcatggtgtagccgaatgtttgaatggaaaatagaaaataatatttgtctttaagttggctttgtatatttccaaagggaaaaaagaaaacaatgctcattcttacacacaattgaacaagaaatcttttttctttagctgggcatggtggcttacgcctataatcccagcactttgggaggctaaggcaggagaatcgattgcgcctaggagtttgagaccagcctgggcaatatactgagacctcatctctacacaaaatacaaaaatcaggtggttatggtggtgtgtgtttataaccccagctacttgggaggctgaggtgggagaatcacttgagcccaggagttggaggctatagtgagtcatgattgtgccactgcactccagcctgggtgacagaacaagacctcgtctcttagaagaagaatttttgtctctaatgctttgctaaaagaaaagcaatatctaatatcttttctttgttcaaagaaaagcagtatctaaaagtgcagagttttctgcattttctaaagggaacttgttgggaggtgctctctcctgatgcgctgttcttgagtgccatccatgatcagggttaggtttggaacagagagggaggagaagacagagaggctcttttgggataagtgagcaagaggtgggatggatgaggaaatgaggttaaacgagacccgttcttgtaagagcaaggagagtgcctggcgtggctcctggttttccatggtgggtggagggcccgggcagccgctgatgccctgtggggaggaacggaggccactctgcaaaggggcctctcgcttccccagtgtcttcatctcgaaaagcaggcagtcagtagcccccaggatgctcttcccaccaccagggaatcccaggaaattcacttaaacacacaagggagaaagcatcctggccagaggtcatgagtgtaagagagtttggttacagtagatccataaaggaagagctgggtggggggccctgaggggggacctctgtcatcctgatagttccagcgtcccggttctagtgtgttctagaagtcttatgtccttcccattttctaactgacgttgtcccctgggaggacaggttgttaaaactaccctataaatggatttcctggcaagcccagtgcattttaaaagatataacaaggatatttgggtccattcaatacaattatttggaaggatcatctgctttgaaattttgggaagttctgtgtagctttaagagatagatatggccgggcgtggtggcttacgcctgtaatcccagcactttgggaggccgaggtggcggatcacaaggtcaggagatcaagaccatcctggctaacacagtgaaaccccgtctctactaaaaatacaacaaaaaattagccaggcatggtggtgggcacctatagtcccagctactcgagaggctgaggcaggagaatggcgggaacccgggaggcggagcttgcagtgagctgagatcgtgccactgcactccagcctgggccacagaacgagactccgtctcataaaaaaaaaaaaaaaaagagagagagagagatgtagcagctgaagccttaaaaatgctgagaaacagggccacaactagagggggccgatggggttggtggaggctgccctgctattcaggaatgccctcaggatgcctccagagaacaaggaggtgtgagcagcaaggggactttaactcaccgaggacagggggcctctgagcaacttctgtgtgtactggcacatctccctgtgccccctccaacccatgcacacacaaggcctctcacattacaggtattctcttaggttctaaaacagccctgaaaagaatggaccagcatgtagaatttgagctttttcatctttttccccctagctagaggattccaaacttcttactttggtttttaatttcttttttcccccaagacggagtcttgcttgctctgtcgcccaggctggagtgcagtagtgcgatcttaggctcactgcaacctccacctcctgggttcaggtgattctcctgcctgagcctcctaagtagctgggattacaggtgtgcaccaccacacccagctaatttttgtatttttagtagagatggggttttactatcttggccaggctgatctcgaactcctgaccttgggatctgcccaccttggcctcccaaagtgctgggattacagacatgagccactgtgcccggccttattttgttttttaaagtcaaacttctctccaaagatctgaggaaccaagcttgcattcattttccttgcccagcctgccgatcgggctggtggagaggctctgaaggcctcatgaaggggctggggatagtgggtgtcactctgtagacagacaaggaagggaagaagagaaggctccagatggaaaggaggggatagaccagcaggagcggctctgcttggcccggtcctgcctcctttaatggtccctgggcctcttctgctctgtgtcacctgcagccaactgggaaggagcttccagacagccagctcgttcagcccctggtctacatggagcgcctggaactcatcagaaacgtctgcagggatgatgccctgaagaatctctcgcacactcctgtctccaagtttgtcctggaccgaatatttgtctgtgacaagcacaagattcttttctgccagactcccaaagtgggcaacacccagtggaagaaagtgctgattgttctaaatggtgtgtgtgggtctactgaatgtccactgggaagggtcttggtggccggtgctgaggaggctggggaggacagcaaggaggagtcacaagagggctggtttgacctgaagggactggtggccgtccagacaggcctgtttttgttgtttcctgttagtgttgtgccttacaagttagtggggctcgtttagacaccgattcttttcaaaggggcacagccacagtccagctctcctcacctgtcacagcagatcctcactttaggtggctcgcccacccccaggcccccctcctttgtctcttcaggttccctgtgctgatggttatagtcacccactctgtccgacatccccagggccccacactcgcagagccaccaggaagcctcacggtcaccctctctgcagtgagaagggctcacactgtagagcctgggaggggagccctggcccggggcctggagcctctttacctgcagaccaagcgttctgtgccagcgagcaggaagaaattgtaccccatttcacactaagcatctgtgttcagaggattgagtcagcttgcttcaggaaacctgatgtttgctagggaacaaattagatcatcacaaagtaacctcatacactgcagttttgattactcactactctttttagagatgtctatttatttaaattccaattagtctgaaccgatcctaataattatgggctctgcttatgaaatttagcttcagacaggagttagttccagtcaacagcagtgggactcctgggtcagaaatcggattttggggcaccatgggtaggtggccctaaggctccatgtcctgcttgccactcctgatgctgcccacagagtcggtggtcactcctggccactgtttggccttcgcaggggttggctgggagagagaatggtggcacctcatcatctggttgtcacatataattaatgtgcttctgcagtgattggatagcatgttgggttttcagaagcagaatgaggctgcaaatcgaattgaaaacaaggaatatacaaaggctcacaaatcagccaccacagtgtgaagcagcatactttaagaagtaaacacccacttagaagggcagcatagaaatcagagtgggcttgctggatcatgtaatacagaagcgggtggtccttgtggctatcttcggtaaccactagtgcacctggatggggacaggtgcatgaatgggcccatatgtggacccacagagctggttctgtcattgtccccttgagagcagtgctccccacgcctagtttacagccatccatagcatgtaccgcagagttctggactgggctttaaacactcgggggaggaatcaataaaacagacaagactgtgtccactggtcagatggcccagggagattcttccctgccaggactccaatcttaaccctaccggattaacacaaagatggatattaaggcttacagaaacttggagaaaacctcagcatactgacagtgtatttccatttgtctgtattgagaaaagagtgaaaaacctgctcagccaccaaccctaggatggtctctgcccaagttccattcagcagcctggacctgcactggtccctgatgacagaccctggctgttggcacggccctgccttctcgacataccttgtcctcttttgactcctgtctcaaatgtatcacagctcccatagcttagtcagatttttccagcatcaaaaggtctttgctctttgccagcctgggatgctgctggggtacctgagagccactgtgggccaggggcatgtggtgcttggagagcttagcctgtctatgggatggggctgtgaagctgctgcgggcatctgttagcatgacgttccaaagtcctgcttctctggcattttcccccagtctcagagtagagtaagtgttgctggtgttaggagttctgtttgcatgcagcgatcttcctctaatggcagatttagcccagttaggtccattgccaggggtaggcactgccagcatttccactcctgctccctccccctcctccctgaaatcatcagtttcctctagttggcttatggattcccagaagcttttcttcactcgttcatcctgctggcagaagcagttgaaattcaaagacctaaacttggatattgggggtgggcttgtcatgcacacgtggggaacatgaggcccaaggtaaagatgaggtaaggacatgcccttctctaaggggcgtactggagcagccaacctgccttcctttccgtttacttcccaggagcattttcttccattgaggagatccccgaaaacgtggtgcacgaccacgagaagaacggccttcctcggctctcttccttcagtgatgcagaaattcagaagcggtgagaacagcttcctcaaaggggaggggggagtttttgtaaacctgagaagaaatttggggaaaaccccaggctgagttctgtacttggcagattgatcggaggaccacagagggctgtcggtttgcatcagtgagaggcagctaagctacaccccccattcggcgcctcaaaactctcagttccttctgagaatttccagccttaccttcacacagtccattaacatgaaggtgacatcattttgttaatagaaattagcaggcaactttgttctgctttggtaaagttttatagattgcttgctgaatatgatcttttctttataagaaagggatttggattgcagagatctcactgagtatttgattctcccagaggcattgtgcccactgctgtgggagctgcccctgcagtggttgtgtgggctgcatccagcatgggcagggtagagagacggaacccctgatcgcagcaaggacggagtccaggctgggcgcagtggctcatgcctgtaataccagcactttgggaggccgaggtgggcggatcatttgaagtcaggagttcaagacaagtgtgactgacagaaaccccgtttctactaaaaaaaaaaaaatagcccgctgtggtggcacacacgtgtagtcctagctactcaggaggctgaagcaggagaatcgcttgaaccctggaggcaagggttgcagtgagccaagatctggccaccgtactctagctggggcgacagagcaagactctgtctcaaaaaaaaaaaaaaagaagatggagtccttagctaatagatgagaaagttctcatgtagtagctctcaggtggcccaggagagcaaggctgaaaaggagtgaggatgcaaaagcagcggctcacgtcaggtcaccagctggattttgcctcctgggtctgcagccacctgccttgcatggcgcctgacctgcatggcacctgcccatccttacaacccttaccagagatgctcctggtgaggagtgtcctgctgttgccctgagcactcatggggcttttgtgagactcagtgagtgaagacacggcaaagcacagagagcagtttctggcctgtcgtaatcacaccgtgttctgtgatgtcactgttgtcatcgtctttgtcatcgtcactgctgccggccctcctccccagggccatgctctgctgccgcccgcttgcagctcacccagacctgctcctgccctctggagcgtgaagcctgactctctgttttctcttgccccccttcccctggcaatttgaattgaacttttaaaaatatgcccttaaagtaactttccctggcaccatctattcctgactcagagttcctgcccttatgattttctgcccaggaacaaaatttgtaaacattcttgaagttttgaatcattcaagtaaaacagaaggtagattaaatagatgtcttcacagtgactgcctacaatgagtactgtggccttggacaggtaaggttttccaagcctctgttttctcacctgcaaagtgtggtaataacaggattaatccacaggatcttggagtagattaagagacgtgtggaatgcattcatggcagcctcggcacgtgagggtcccatacacagtgctgcactccgctcattcttccctctcccgccccctcagctgtgacctcctgtggcatcaagttaacctcttgttcgtttttttccttagattgaaaacatacttcaagttttttattgtaagagatcccttcgaaagacttatttctgcatttaaggataaatttgttcacaatccccggtttgagccttggtacaggcatgagattgctcctggcatcatcagaaaatacaggaggaaccggacagagacccgggggatccagtttgaagatttcgtgcgctacctcggcgatccgaaccacagatggctagaccttcagtttggggaccacatcattcactgggtgacgtatgtagagctctgtgctccctgtgagataatgtacagtgtgattggacaccacgagaccctggaggacgatgccccatacatcttaaaagaggctggcattgaccacctggtgtcatacccgactatccctccgggcattaccgtgtataacagaaccaaggtggagcactatttcctgggcatcagcaaacgagacatccgacgcctgtatgcccgtttcgaaggggactttaagctctttgggtaccagaaaccagactttttgctaaactaatgcataagacctatgaattcaaatatctttattagacctggggctaaccaggtgaagatctgagcccagaaatgacccttcctccaccacacccctcctttgaggacgcccggggtctcccacaggcctgtgagttgcctcggcatatgacgcagaaccccaactgttacaacttagtttggatgtaagatgctctgaggaccctgcccacacccctgcgtgcattaggatgtcgctggcctttgctcacctcagaggggagaaaaggctaaagatttgcagtttgacagcccagcagggaggaagcatcacacagcgttaggagccgtttccttcaggtgttaaggaaggggatgcccctgaggttctcctggctagtcagggtggcttcacccatcactggtgggttgcaggaacagcacccaggactctgaggagggacagagaagcaagggggctgctgaaatcgcagagacttttgcagcatcagatctgaggagtaaaacggcacctctggccttcatcttggtgctgcgacaattgtggaggcaaagcattctttctgtgactattttgttcctgtagacagtcagcgatggccagagggtggtgtggtgtccaggggtccatctttccagaatccatgcctgtgtaatgctggtccatgcttctgaacctgtgtctgccaagcgcctatttcattcagcacaagacatacgattttagaaggtgaggggaggggaggctttttctacctgagaaggggagtgtctttgagggccttaaaaggaccatggcccaggaatgggggcgctggttgggcttggagctcaggctgctgtggatcccggcgcatcagttctgacttgccttacctgggtggacagcagtgaatctccacctgtcttctccagggagctcccatgttggggctgaagacgagcaggggcaacctgccagcatcacagaattcagtgtagtttatacatttcgattcctttcatctcagcaaaatgggcactgccagagccatttctgatcacaccaccatcctggaccatgtgactggaaggtgggtaaccaagttcaccagcaataaaacccagcgcccaggtagcctccagcagtgcggcttcctggcaacaaggtaggccctggtgcagggcaagccgcagcgaccatttcagataccgtccacagccaggaccgctgagaactgggacagtttcctgggatgagtgccagcctgagcctgcatggtgccgccgagcccggggtggaggagggagccaggcttcgcttcaaggcggcctctaccttttctcagaatggtttcctgattgtgtcaatgtgaaagttaaataaaatttatgtgccaaacctgacatgagctgcggttctgggaagggtgcctgtggccacgcgcgccccaggcaggtggggtaggcatgtgcgcacgcatgcatagctgctcagggtaagcagaccgcaggaggcccagccttcagccgccatggacacgcagggccgaggacgccacactgggttatttttctgtaacgtttagcaaagtcttgttacaatttcagaccaaatgagctgattgattacctctttgctgtttggaatctaactgtggatctgtatatgaatggaaggccttaaagctagtcttaattaaaatagtgttttccctcagaaacaaaattctggcccctggggtggtctcttcctcccctttggcatttgggtcattttcctaacatattttgccacacaagtggagattgctaccatagtatctcctggacatctcactgtgtccacagcaaggatgccgccaagcacggcagcccaccccgttcatttctgcacagccagtacccccactcccctgtcccctgacttccttctgaggctccagatccactaactccctcctcagcttacagcaggtggtgcacctccttctgccccctgaggcaccaccatgtggagggctctgctaccctgtctgggcgttcctcaggactgggctggatggtggcacagctcattcccaggcagtgacaccagggtgggggtggctggagtaggcaggcctagggggacctctgcactaacagcctgggtttgagagaaacaaacagcgaccctgcctccaagaagtgctagggcccggagggcagttcctaaattaggaagtttaataatacgaggttgacttaatgggtttgtgttttagaccgcttctctcctactggatttcactcctagcgcgtgtcaggtttattggtcttgtgttgagaaccactacagagaaatgcccagagctgagatgagatttgattttcacagtggctgactgggtgcacacgaaggtgtgcactcacggcctgcagggcacccaggtggcctctgccctgggttcctgaaaagaagagcctctgacacagcactggggggggtcctccctttcaccccccagctttctcgctctaaaccccggcatgctttgctcatctggaatctccagaagcagggaacagaaagggaaaaatcaagacagcagctaaatgtgaggcgaaggcagcctattggactaaactcaaattatgcagcatagtttcccaagctcctcggacatgccgagaccctcagcaggatagtgcagttacagggctgagcagaaccgcaggctcataggagatgagaggcctgggaagtgccaggacaaggctgcacctatccagcttgagtcaggaggcttcaggcaggtgaggtagccacacttggggagcattacagaagggttggccagaggagaggatgcccagggggatggaagctgcatccaaggtatggcgggtcggctgtgaaaaatgtgggcgcccagacaggaaggctgggcagcatcacatagggcttccaggggtgtgctcttcccctccgggaggaggggcaaacacaaggcaaccaacagctgtgatgattggggtgatagggggttgtccccaaagctgagggaggagcatgcaccagtacagactcacacccctacagcaagtagttggtgcctggaggggaagggcaggtagcttgatgtgaccaggaatggctgtgctctgcaagtttgggtgtcatttgggtaataggggctctggaggatttattttttctttttattatataaatttaaaaatatatgttggctgggtgcaatggctcactcctgaatcccagcactttgggaggccaaggcgggcagatcacctgaggttgggaattcaagaccatcctgaccaacatggaaaaaccctctctctactaaaaatacaaaattagctgggcttggtggcacatgcctgcaatcccagctacttaggagtctgagggaggagaattgcttgaacccgggaggcggaggttgcaataagccaagatctcgccattgcacttcagcctgggcaacaagagtgaaactcattctcaaaaatacatgtgtgtgtcaaagtgatcactgaactccaagtagctctcagcttcaaccgtttgtttttttgttatgtttgttttgtttttggagacggagtctcactctgtcgcccaggctggagtgcagtggtgcgatctcggctcaatacaacctctgccttctgggttcaaacaattctcgtgcctcacccccctgagtagctgggattacaggcatgtgccactatgcctggctaatttttatatttttagtagagacagggtttcgccatgttggtcaggctggtctagaactcctgagctcaggtgatccatctgcctcagcctcccaaagttctgggattgtagccatgagccaccacaccgggccccacagtttttgtataacaaattccctttctcatttcatctgccccttgccccactcacttaccgtgacttgtatggtgcacacacctgagaagctcagactggggatttgagtcccagtactttgacaccagagcccacagcattgactgccagctacattctactgactcaaatccattttttttaaccctgctgttctttggttcattgcccttcattcatctgaccaccccaccaaggcccccaacccagtgcctcccagcagcagctccccttggcttctcagcttgctctccccattcaccatggtgtctatttcaacattgtccatttttctcaaacttccactccattctcatttactgtgggcagatgaccttgtccccgacagagggaacaggtgccatcagatgagcattctccaacatactggctccacacctgcaaacttcctgtatccacacatcctctcccccttctactacagtgggcggggcttgcctcccaccttgctctgcacctccccacatctgttccgaattaccctcctgctctagtgccagctcctgtatctgcaccccttctccccactgggctctttcccggtggcattcaagcacgttcagggctctcgaatcctaagaccatcctgccttagctctttccccatcccacatggggccctgccttacctgtcacccccactccatcttgaatctagcagttttcagggcagtcagtcaattttccagattcttttcttctgtgcatcctttaatttctattgcttcccagtattcttagctcagttcttttctgtcaccactctctctgggcaaggaggcctccctgcagatcttcagttaccatctgtgtggaaataagccccatggggacccaagaacttttgtgtgttttgtccgctgtggtagcacaactctctaaaaacagtgcttggcacaaagttctcaagacttttcgaatgctgatttagacccaagtttgtgccttctgtctgcatgtctttttgagcttctgacacttataccacctgcctactaggtatttcctcctggttgccccacactcatttcaaacttattaattcctgagcagaaccttcatcttccccttcaaacctgttggtttatatgtggccatgatttcagggaacagtgacacaaaccatccaggtgtctgaaccagaaatctgagtcagaatcttggacaactccttcttattcactcctcacatccaatcagtcaccacttccagtagattcaactatttacaggtttcgggttcccggccacttctttccatcccttttgccacctctccagtatgggccactagacgtcccaggcgggccacacccacaaacacagatgcctgccctgctgctccccctgcctctgcctctgattttggccacctgcaatcatttctttcttttttttttttttttttctgagacagagttttggtcttgttgcccaggctggagtgcaatggcgcgatctcagctcactgcaacctccgcctcccaggttcaagtgattctcctgcctcagctgcctgagtagctgggattacaggcatgcgccaccacaccaccacacccggataattttgtgtttttagtagagatggggtttctccatgttggtcaggctggtcttgtactcccaacctcaggtgatccgcctgcctcggcctccgaaagtgctgggattacaggcatgaatcagcatgcctggccccacctgcaatcatttctataccccacagctagagtgggttttgtcaaataaaactctaattgtgttgctccttagctgaaactgttaaatggctccccattgctcttagaaaaaaagtccattttcttccacataaagtacaaggtctttaaggatttagactctggttcctctgcagtctcatctctcaccatctccttcactttcactccatgcccaacccataggctttggctgtagccatctattctcatctccatgagtttgccatggcctcttgtcatctccagaccttgtcacaggctgttccttgcaccccttctcttcaggtagctaactgctattcatcccttaatatccagctcagaaagcatttaggaactcttaagcccaagatgcccttccttgagatacaattcatcctggggcaaaattcctgtccatctgtgaacctatgaccagataagttacgtgcttccaaaatacaatggtgcaacaggcacagacatcctcatgccaaaagggagcaatcagaggaaagaaagggatgatgggtcccaagcagttccaaaacatagtaaagcaaatcacattagggtttatggcttaagattaatcttttttggtttgatgctctgccctccagacccactggagcagtggtctcaccttccagaaccactggggtggcaaagtcactcccatgacttggcctgttgccccacctcctatgttgcccatgctggtctcaaactcctgggctcaagcaaacctcccacctcagcctctcaaagtgctgggattacaggcatgagccaccgcgcctggcctctgctgtcgttagtgtcagctggcagtgtttctgttggtatcatcccatttctgttcctggccatctctgttgagatggctggttaggtccatgctccacacccacactaatctccttatcaaatggtaggtcagccatacccttgttctcttctgaacatgttttcttattttttgcaacatagactgagaatctcaaaatcttttggctctggttcctttttgcttaataattcagtcttcaagtcatttctctcttcttgcattttactacaaccaatcaggagaaaccaaactgcttcttcaacactacttagaaattgcttcagctaagtacttaatgtcatcacttgcaggttgtaccttccacaaaacactggaacgtcaacataagtcaggcaaatcctttgctgctgtataacaaagataacactttctgcattgtgcgatgtcattttcctcacttctgtctgcgacctcactagaatgacctttaccttccatatttctaccaacattctgttcataattatgtatatattctctaagaagatggatgctttctgtacagctctcctcttttctatttttttttttttttttttttttttgcaaaggagtcttactcagttgcccaggtggagtgcaatgacgcgagctcggctcactgcaacctctgcctcctgggttcaagcaattctccggcctcaacctcttgagtagctgggattacaggtgcccaccaccatgcctggctaatttttgtatttttagtagagacagggtttcaccatgttggccaggctggtctcgacctcctgacctcaggtgatccacctgcctcggcctcccaaagtgttgggattacaggcgtaagccaccatgcccagcctctcttttccatctgagtcctcatcagaatcacatttcatgtccatattgttagcatgcatctgaaacttctccattatctgtacatcatccgtttccaaagctgattccacattatttgttacagcagcacccacttcttggtagtaatttcttagtctacttggattgccgcaataaaatactatagactgagtggcttaaaggacagaaatttatttctcacagttctggaggctgagaagcccaagatcatggggttggcagattcagttcctggcaagggctctctttctggcttgcagtcagctaccttctcaccatgtcctcatgtggcagagaaagtgctctgatctccctcctcttataaggatactaatctgatcatgggttcctatcctcatgacctcatctaaacctaattacctctccatggccttaccttcaactaccattgcactgaggattagagtttcaacataggaattctggggcgcacaagcattcaggctataacactatgtgatcgtcagggcagggaatatttacatttgccatagcagcacccaagcctgaaaacaataggtgcttcatgaatgttgaattgacttgttatgttcatgcggatatggcattttctatctggacattcactgacctccttggctacccatatattgtataccttggcatggatgcagcaaccactgaatcttcctccccccttcccctgctgccaggattcaactagggaataagatattaactgaaactccttctaccctcaccctattccaaaaccctatcatgaacagctctcacccgcccttcctgtcccataatttgaggatggggatgaggaaaaataaaagatcattcccacagaaaagtggttgccaatttctaaatgtgtattttctttttctgggccatctcttgccttctcccttagaaaagtgccagatgtaaaacaacaataggaatttgcactttcattaatctcaaagtaacttaagtgtaagatatactttagagatctttgcacataatatcaaagctgtctatgaacattgagcagctcaactcatgtcaggccccactgctttggaaataaaagacatgggaatctcatctcgagccagccaagttggccgtgctccaccttaagacctggaggcccagtgagttcctccaggcccagaggttctaaaggaagaggtagctatgcctgcaagctaagccggaatggaatgggctgagcataaccagaaagaagaaagtatggccacctgtctccacactggtcctggtaataaaatttgtctacatgtagaggttagaaatggtgctttgtggctggatgagaatgcgctttaataagcattcattcaaggacttcatagaaaacccactgagaacccaggtgctaaggaaggaaaagagaattccttttaccttcctcctagatcccttatgcaagaaatagacttggagcatctggcttccaggccctttggttctacactaatacatttactccattttgtaaattcagaactagtacccatgaccctacacgaataagtgaatgggctctgggccttgcgtttttcagaaagtgaattgccctcaaaccctcagttttcaccaagatgttgataaggaatgacaggttaaagtatttgctcagtactcaagtttgaaagtaaaaactagcgtaggacagaatgtaccaagttaaccaccagggaagtggatcctgtcctgttatccaggaccaggttttattaaatgattcatagaatcagatccatttattccaagtagactggaaatactcgtgtcctgatcctttttgtatggttgaaaccacttcattagacatgttgcaatagtaaaaagcccgattagcttagtgtttactcattttatttctcagttatttaatattttgttttccttaatatccatgatgtttgtctctggtgttctgatgtaaaatcatagtgtgtattttttacactaatgttgaaatctgaaatatatgcacccatctttaattttgcgtgatgtgttttacgtgctattcctttctcagtgacagaaatgaacagaccagaatttgtgggatttgggtacaggatctccataagctgagaatgcccctcttgctgttgctgccagactttcggaggctctgtggctgagccccagactccttactgtttggacactgacgtgggctctggcctctgcattttccagaaccccagagagacctggaaagtcatcctcagcctccattcctggtcacagatgataatgtagaactggccttagctgtctttcctgggctctggctttctgccaccttggactttgctactttctgtaggacttagtagcacctgccatactctgccactccctcccctctaggctgagccctgtctcacagactctgaacaatacgaggcttttgctgcccaaagtttgtcatgattgatttaaactagcatgccaaaaataaattcctaaaagtcagtaagtcaacttaataactgtgaagttcagttatcaaaaacttatattatttttagggacaaaatcttaataacctggaaagatagatttttttaaaattagtttttgttcttcagcttaactgacacgtaatttacaaaacataaattttaccttttataagtatgcagttctatgttttagtaaatgtacttttgcgactattactacaatctagttttagaacacatttgttacccaaaaaatctcctaaatacccatttgaggtccagctttaggcccaggcaaccactcttcttcctcctgtttctgtttttgcctttattagaaatttcacataaatgaattaatatgatgtataaattcttgagtatggcttttttcccttagtatagtcttttagatccatccgtattgctgcatgtatcaatatttagttcatagactgggcgcggtggatcacacctgtaatcccagcactttgggaggccaaggtgggtggatcattgaggtcaggagttcaagaccagcctggccaacatgatgaaaccccgtctctactaaaaatacaaaaattagccaggcatggtggcaggcacctgtaatcccagctacttgggaggctgaggcaggataattgtctgaacccaggaggcagaggttgtggtaagccaacatcacaccactgcacttcagcctaggtaacagagtgagatcctgtctcaaaaaaaaaaaaaaaaagaaaaaaaaaaagaaattagttcatttttactgctgtgggaattccattatatggagataccaattttatctattcaccatttgatgaacatttgggttgtttcccaggtttggctcttatgaataatgctgctatgaacacttgcatacaagacttggtgtaggtatatgtttccacttccatgggatacctaggcatggaattgccggtaataaatatgtttttttctaatgaaaagaaaatcaatgttatggcttttccaaagggcaaaactaggctgaacttccatgttacagagagaataaaactaaagaattagccataggcaaattgcactgataaattatctgaaaactaaaaggttaattataaaaataacagcaacatattttctagtctacagttgatccttaaatattagtaattatggccgggtgtggtggttcacgcctgtaatcccagcactttgggaagccgaggcaggtggataacctgaggtcaggagttcgcgaccagcctggccaacatggcgaaaccccatcgctactaaaaataaaataacataaaaattagccgggcatggtggcatgtgcctgtaatctcagctacttgggaggctgaggcaggagaatcacttgaacccaggaggcggaggttgcagtgagcggagattgcaccactgcacaccagcctgggcgacagaacgagactccgtctcaaagaaaaaaatatatatgtacatattagacaattatgatcaaaagctgtagacttctagaccagagtctagaagggtgtggccatgcttgccctgggcagccccatgacagctgatgtggaaagcgggaagaggctgacaatccttctccccagcatgtctgcatgaagccttgtgattcactttcaccaagtacctgatgtttcacaattccagcattcccgttaatgttacctcccattgatcctaaaaagaggcaaatatgaagatgtatataattttggataaatcaaaggtggttcctgaggaggaaagtgtccagaacctctgatctgcatagtattttacacacttccaagcataagaagatgaacagaatggcagaagtgagagtacccattttacagtgaggggcatcaaagaacaggaagtgcaacaaatgagggaggttcttgggctaccattcaaagctatccacttggaagtttctctgccagtttcatttccccatgttcctccagggggcgctgtttcctattctagctcctgctaaagccaggttccctttctgtaaactcacttggggaaactcaccaaggtactctccgaagctacaatcatgacagttacaaaacaccgctgttcggagattaggcctaggacatacgtggtcagatttttctctgttgaagagcaggtagagaatgggaaaacaagtgtacagaaatcaccaaaaatctcagagctgcgggaacagaaattttgtctgttttattaaatcataagttcaaaaacaatgcaaagcttccctccctagaagataattcctagtaaaaggctgctaaaacccacagggttttgttggtggtggtggtggtggtgttagtgatttgtttgaaatctggaacgccttgctttggtctttgtatggtttcaccatgattttacccatcctggagcctgccccagcaatacttgggacaagtcacactaactatgtatgtcttcctctgaaaggaatggtgacctgtggtgggcccagagcagccgttccagttacaaaggggtatcttcacctgcagtgaagaaagcaactctcagccacaggggtgttagccgaccttggcctgaatagaggctcctcagggctttggagggagttttagaaaaagaggcctctcagtgcctggcagagttgtgctcatcagcttcaacaaaacccatctaactaaatgcagggagcatttgtgagcaatttttctattcaatgattgctcaaagttgcagattattctccagatgatgttcttgcttgataagaacccagcaaacagtaaaatcaagatattcagaaaaagctttatatgtgtgtgtacgtgtatatacataccatataactcaggttggtttcagtaagcctacagctatagcttccgttcttggcaaagatatataaagtgtattctttgcttttatgtaatgcagcagggtttttcttcctttaaaagccttctgctccacacattgactgctttcttgcttcccatgttatcgtgtacacacttcactgacaaccttcagcctgtatcacctgagatatgtttctcctgcacaaagacacagcatcctgctgattctgtctttgtggtattaatggcagatggctttaaaaatgcttgtgggggtcaggtgcagtggctcacacctgtaatcccagcactttgggatgcagaggtgggatgctgaggtggatcacttgaggtcaggagttcaagaccagcttggccagcatggcgaaaccctgtctctactaaaaatactaaaaattagctggacatggtggcaggcacctgtaatcccagctacttgggaggctgaggcaggagaatcgcttgagcccaggaggcggaggttgcaatgagccaagatcgcaccactgcactccagcctgggtgacaattacttgtgggaatctgcatgtgaacgtacctggctgggaacaccctggcagatacagtcatttaatgccaggaataaagggcaggaaggtgtatagtgagagaatctgagaaatgggcaccaggtgtggaaagagctgtaatgtgaagtagaaatgggtaggcttgctttatgtctttaatttctttcttttttttttcttttttgagacagagtctcgctctgtctcccaggctggagtgcagtggcgcaatcctgcctcactgcaacctccgcctcccgggttcaagcaattctcctgcctcagcctacctggtagctaggactgcaggcgcacaccaccatgcccagctaatttttgtatttttagtagagacagggtttcaccatgttggacagggtggtctccatctcttgaccttgtgatccacccacctcggcctcccaaagtgtgggactacagacatgaaccaccatgcccagcctatgtctaatttctttttagcctgcttcctgctttttttttttttttgccacatgattctggagaatgccaaccgatatctacgagatctgtgaaactgagttatacatataagaactactttgtgaagaagatttaccaggacacatgcaaaggatttggtgcgagaaatttccattgtaatgctgtacatgctcaggttcagggacttctaagagggaaaaaaaggccacagagctgttgtccaatcaatagcctcattaccactcaaccaataactccattaacactaatgatggcttgtttccactcctggcaacaaggtctgtacttgtagaatgactaatggccacttcatacagaaatccacgccatctcctgttcaatgtgcatctgtgtcccaggcaggtgggatgttgttcatagtttatttttatacgctttgaatcatgtaaatctgggcctgatggtgaaaacttgtctgccaagggccagtatgtaacgacagtgatcgtgatgttaattgtggtggcccgtgttcatagcaccatcccacagggactcctcatccatcatttggctttaatgttcagccagtcctgctcatttgggaatcagcatgtcttcttgatgtaatggtaggtaagtttgattgtgaaaatgaggaacgggcgtgctcagtgcttgccgaggggctggcaccgagtctactaggtagaacaggggtttctacacctaaaacatgtcattgcggttctttttctgtcttggcatatgattaattacttcacctttgtgtgttccttagtacttttcagtagacacaataatgccagctaccatcctgggatataatgctataaaaactaactatagttccttgaatgtttgtgtttaggaggtgatacaggctaaaaatgtgcttaagatcaagaagatcttagatgctatagtaaataataaagtatagaatttaatgatgagagtagaatattttggttttacacagcactttgaggttgataaatggacactaccaggctctctttcagaaggatacactgcatagagcatcatccctgtcatcatcaccatcaaataacacccctttgtagggcttaataatatatgatctgcaaagagctaataatctagtgataggaactctctggcccttaagaatgtacattctaaaatcaactaatcatttagtatatcctcttggtaaatgagaaaaatgtaaatttaagcaaacataattgtggagaagttggacctcttgtaggaagtcatttcaggatgctcttctcatttagttgagaatctcgatgtgttgggtgagcaaagagctgatttcactgaggacgccaagagcactgaatgtgccacataagagagggagaaacagaaagaggtaggctttaagggggtaaggtgaaaccagttgacaactgtgctgccagataagcagtaataatattacttttatttctattgtttaagtaacattggtataagtacctattttaccaatttaagaaagttagttcactatttcagtgttagaacaacatgtagtttataactaaaagcaccttgaaattagtatagatataaagattagatcaaaggggctggctgagcacacccacctacctctccttccctttgctttcattatttctttgcaactttcttcttgcccacctacccaggcaacaagtcctcctccttcccctaaaacactggggacaggagacagcaaacaagaacagcagctaccaacaagcgaacagggaatctcagacctaataatgagtgatgcgcaatcaagaaacatcagacacttgggggcaaagcagcacagtgaagcagaaagaacattccctagcaatagcagaagaatgtctttctgtgaaatttagatttgcaaaatctgaacaccttggaattgttgcaggtgaacatcatgccgtggccagggtagatgggccccgaacagaaataacacttctcaacaagcatgttgaacccgtatgggtccccactgaccaaaggccaaacttgagaggaagtgaccgaatacctttctagtaaagcaaattaatagcaatgctgttagtgccaggaaaagaaaaagggtcatcaattgaaggcaaattttaggtaatccctgcgaaacagaaaacagacagaatatgattaatgaagacaatgatagcctcaaacccagaaagggctgtggcagcaaaagagtggccactactctgggaatgttccaagttcggggacattggacacagggagcagcagggaacctgggaaacctgaaaagcgattgggtcgagaacgacattcagagttcccagttaggtctggccctttgccaagcttgtgccaagtaggtaacagcagaggtgtttgccctcagctcaaagtaatgagtggatgtgccccagggctggagattccacatagctcaaggggaacagggaggctgggcgcggtggctcacgcctctaatcccagcactttgggaggccaaggtgggtggatcatttgaggtcaggagcttgagaccagtctgaccaacatggtgaaactccacccctactaaaaatacaaaaattagctgaatgtggtggcacatgcctgtactcccagctacttgcgaggctgaggcaggagactcacttgaacccgggaggcggaggttgcagtgagccaagattgcaccactgcactctagcctggggaacagagcgagattctgtctcaaaaaaaaaagaaaagaaaagaaaaaaagaggaacagggagcctcggactcaggagatgagctgctacacaccttcctcccaaagagacatgcctcctccttcccctcaaacactggaggcagggcactgcaaagagacagcagttaatgacatgggagcagggaacctcaaacctcacaaccaaggagcatgagacacttgaggggaaacagcaccataaacaggggcagcaaggcccacaaggaacctacaggaggaaggaacctacaggaggaagcatcataaacagagcagacagaataggacaattacaagaagtatcactaaccatagttttcaaccaattttttaaattaatttatttattttttattatactttaagttctagggtacatgtgcacaacatgcaggtttgttacatatgtatacatgtgccatgttggtgtgctgcacccattaactcatcatttatattaggtatatctcctaatgctatccctccccctcctcccaccccacaacaggccccggtgtgtgatgttccccaccctgtgtccaagtgttctcattgattttgaaccagtttttgaaaaccagaaagatgaaattctcttgtccttcttttgtctcatttgagcacaggattatactgggctcctaatgagctggagctggttagcatcacctgcctgtccccccaccccttttttttctgtgccctggaacagtttgcataagctatgagttatttgttccttggaggttttagaaaatacaccccaaaccaccatatgggccttgaacctttggcagacagaatacctcttcaaatgttatttcatttttttctatggttgttggtttgcataagctttctactccactttggaccaactttggaacttttataatcctgtgagttgcctatgtcatctaagcttgcaaattcaatgaagtaaagaaatattaatttctaattttaaaaaactcttttgtatctgtagttaagcctcctttcattgcttctgtttttcattactgtcttctttctggtttttgtcttaattatacttctaaatatttgtctatgatgttggtcttctcaaatgttggtcttatgatgttggtcttttgaattatttttatttttttgagacggagtctcacttcgtcactcagcctggaatgctgtagcataatttcggctcactgcaacctccacctcccgggttcaagcaattcccctgcttcagcctcctgagtagctgggactacaggtgcccgccaccatgcccggctaatttttgtatttttagtagagacagggtttcatcatgttggccaggctggtcttgaactcctgacctcatgtgatctgcccgccttggcctcccaaagtgttgggattacaggcattagccaccgcgcccagcgctttcgacttttattagtcaaatctactgttttattttattttctattattaatttttgttcattcctttatgattactttagtccactttctttaagtttattttcttgctttttttttctttttttttccctgagagaaattttaaaatttttaaaattttcttcaaggctctaatttttctctcagcacagtctttgagttgtaggtctttttgctgtctagtcctaaagaattttgactttgacattctttttagatgtatttttaaaaatacctttaacataaatatgtatagttgctagaaattcgtattttgtttgcttgttaagtccttttaatgattaccatatcactaaactgtggtagtgaattcagactgtagacaaaatttttaattttttgttgagcgttccttcgtggattagggaaatgtcaaattgtttgaaaagtgcttttgtgaaaataattttataatatctctattacagagatatatttcatatatcatacaatttatcaatttaaatggttttgagtataattggtatgtgcacctgtctacctagtcaattttagaacatttctatcaagccaaaaagaagcaccatactctttcactattatcctctgtttcttccccaccttttccctcaccgagaaatgactaatttactttctgtctctatagatttgcttattctggacattttatataaataagatcatataacgtgatattttatgtctggcttttatgactaagtgtaagtgttcaaagtgttcatccatgttgtagcatgtagcaatcaacatcaaatagaagtggtaagatacgacattccttccttgttcctgattttagggagacagcatccagtctttcaccataaagtatgatgttaattacgaactttttgtagatgccctttgtcagatggaggaagttccatagctagtttgtttagtgctttttatcataagatgctgtcagattttatcacatgatttctctgcatcaattgagataatcaatggttttctcctttcttctactaatttggcatattaatttaatggatgttccagtgtttaaaaaaacactgtgtgcctgcgaaaattcccccttggtgatgatatataatcctttttatacaactctggattcagtttttcaatattttgttgaggatttttatgtctatattcataagaaatagtggtctatcaatttctcatgatgtctttggttttggtatcacggaagcaattgcctcatagaatgagttgggaagtgttttccctttttctaaatgttttggaagagtttgttaataattggaattaattcttctttaaatgtttggttaaattcactagtgaatccatctggtcctgtggttatctttgtagagagttctttattactaattcaacctcttttctattggtctgttcagattgtctatttgttatcagtttttgtagtttatgagtttataatgaatttgtccatttcatctaaattatccatttattgacacacaaattatatttctttataatcttttctatttctgtgatgtccttttttatttctgagtctagtattttttgtcttccttcttttttttcttggcaattctagttaaagctttgacaactttgttcatactaacttcattccagtgagatataaaaatgtcactgctatagctctattcacttcctcactttctggggcattatttttatacataaactaatgttaaacatgtaacactacattttaataattattatttttataattttatgtattttaaaggagctgttatgggttgaattatgttcccccaaaagatatgtactaagcctcagaacctcagaatatgaccttatttggaaatgggcttattgtaaacatagttagttaagatgagataattttggagtagggtaggcccttaacccaatatgagtcgtgtctttacaagaagaggagtgagaaagacataaaaaggagaatgccatgtgaagacacagagacacacaaggagaagaaaagcacagggaaggcagactggagtgatgcatctacctggtaaggaatgtcaaagattgctgaacaccagaagctaagagagaagcatggaacagattgtcccccagaaacctgcaggaggactcaaccttgctaccaccttgatttcagacttgtagcctccagagctgtgagaggattagcttacattgtttcaagccacttagttttgtgataatttgttgtggcaaccccagaaaactaatacagaagttaaggaaggaaagaaaaaaagtaagtatatatgtgtagcttttgttatttcagtcttcttatttattatgtctggctctctttatttgcctggatttgagttgctagctggagtcattttctcagccaaatacactttttctctcatccacttgtgctgttattggcatatatttctatatattatagacccctcataacacatcatatacatatacacacatgtatataatttctaacttatgtatataatttatatcatatatacacacatatatagttttatacaattactttgtaaaacagttaagggaataaaagagaagaaatatgcatttatactgtatgttataattacatgattatgtttcctggtggtctgtgctttatcatggggattgaagttactgtctgggataatttgttttcagcctgaagaatttctttagtgttttctgtaaggcagctctgccaataacaaatactctccttttttgcttatctatgagatatttgcctgcattttcaaaaaaaaaaagctctatttgcctgcatttttgaaaaatagctttgctgaatatagggttttttgttgacagttttttttttttttttttttttgcttactttgagcactttgactatattatcctaatgccttctggctctcattgtttgtactgaagtcagtggataatcttataagagtttccttgtgagtttccttgaaggttcccactcagaagctggacgtcctgcttgagatattcttgaaagaatatctcaaatggaaaacttaatattttacagtgcttaaattgttatctatagagcagttaaggggaacgataatcttataacaggatctgcatgattcttggacagtgattgtttttttttttttctggctgctttcaagatgttctcactgtctttggctttcagcatttttatggtgatgtatctatttgtgaatatctttgcatttatcctatttgaggtccatcgagcttcctagttgtgtagattaatgatttttcatcaaatttgggga

SEQ ID NO: 11 - DNA, 45770 bp, Homo sapiens
  allele (1)..(45770): CHST10 Variant Allele (rs7574684)
tgaggcggtgccggcgttctggcccccaaagccggtctagcgcgccgggcgtcttccttacttccgctgccgccgccgccacatcccgggacccgacgggccgcggcgcggaggcctcggggcaaggtggggcgggcctcccgagctcccaggaccccgcgcgcttcgcccacaggcccggcgaagcccgacccgcgcggcgcccccagggccaggggaggagcctaaggacccggacgagcgccgctccagtagggtgagctcggggacgcgcaggcgggtgggtttcagcgcctgggcccctctccccgccgcggggcgcacggaaaaaccggggaacccgcgggttttgtcctggcgagccacatcccggtgtgttttggcgacttgaagacctccctagttcgcgggagtagcgggaagagccttcctcgcgttaattatgcaataagaaggcgtccttgtgcgggatgctgtgacccgcggaattattgatattgtgcgagcctacaatttacttctttcatccttggctgagaatttgcgtttgtaattgtagatggagagaggaagaaagggttcagcttgggtccaaggagcatgcagaggaaggcagggaagaaggagcatgtgcagcttcggtgcgaggggagtcaggggtgggaatgcacgttccctgcctgaggggccccggggtgccctgagcctctgatcttcgctgtcaggaggcctgtccgaagttggaggttgaggcatgcagttctgcacttctggctgggaaggtgaaccaggttttccaaaatgtcatttttgctttccaagtctgcaaggcaggaaagggttgggcagtgaatggaaagtagtgcagccaggttctggttagctcagcggcaggactgtcataacggtgggtttttgttgttgttgttgttgttgttgttttgtctgaaaaccagagtctggggctttgggccatgaggagttgggttattgcattgcttagagtgccagagtgagaaatgtctcagacgctgttaaaattaggcagctcagtttagctctggctctctgataaccaaccacctcctccttcactcttttcagtgactgggttaaaatgaaaagacacaaagagagaagtggtcttttcccttccctccccattataattaagagcttagtccatcttggctcagaattggaattcagaattcagaattgctcttgaccctgaagaatagaatctcaaagaaatacctgagcagaaaattctcttcttcgctgaaatgaaaattggagtgtttgcaaaactgaacaaagaaaggaaagaatttgtaaacatcacaggcaacttgcagttatattcggatcatttttcagtgtttgaggagttcatacaataaaaaggtgagagagagccaggaatagaaacaggggagagaggtggttgcaggaccttagagattgcagaaacccaggagttcattttcttttcatacacttctggataacctggatgtgaggaccatcaaatgccgtacatgatgtttctaacaatgatggaccacatatacaacagtggtcccataagactatactaccttatttttactctaccttttctaattttagatacacaaatacttaccattgtattacagatgcttacagtattcagtacagtaacagcagtacaagttagtagcccgggagcaatagatgattccatatagcctaggtgtgtggtcagctgtaccatatagcctaggtgtgtggttagctgtactatctaggtttatgtaagaacgctctgatgtttgcagaagaacatcgcctaacgatacatttctcagaaggtatccctattgttaagtgatgaatgactgtatataaagcttaatctttcaatcaacataataggaaattgcttttaattttagcattgagttcttagagtaaagggaggcagagagagaccgtgctgcatgtgtcccagtcagcttgggctttattgtatgttaaatgagttgtatgtttattttggtagatctcctaaatccatgatctaattccatgactttggcttgtttctggttttttatgatatggcatttggctaaaattttccaggtgctaaaggtgtaaggagtacgaaaatccagagaacattttgcattggaagaattgatcatcttgtataggaatcctataactatttcaaacatacgaaacaggcataattggatttgattatttttgctacaaaaaatgtttcatttttcacactaagttacatggaagagtcttttaaacagctagtggttttggtacatttagaatattcatttaccaagaaatccaaatataacctgcctttgtaagagacccattctgccaaatatatttgaatcatcaaaatggttcactatttccttcctaagtataaaccaagttgtattaagtaagttgatcttgtaacttttaataatgcttttttttttttaattttcctatccagtgacaagaggaaccaagaacctcagttcaggggaaacacagcaaggaaatgtgagccccaggctgcagaaggtacgtgaaggagaatgtgagctcatcagttatttgagcatgccattcagtattgttcctgccttttttcttgcctgtgcagattgtaaactcttgattaggagtatgtaaatgtgtgcttagaaacgtttccttaaatataataataggagcatgctctgaggctgggattatgtgagttagtacctgctgagacctgtgcttggtacagagtgaaccccatacaggtgtttactgtatattattattattgttcatgaaaacctgtcttaactacaggtgtatttctcactggacagttaagagtgttttcattctcctaactaagggtggttaatcgttccaaggcggtaaattgtaaggatgacaacagagaagacaaaggaaatttctgtacgcagattgagagaaacctttactatgaatttgaaagtctcagtgacatgcaatagaactttatagtataaattcatatgccacactttgcattatggagttgtaatttaatgattctattgatagggtaatgcattgtagttcagaatgtgctcagggttgatggtgaaatgtccccgtttctgcagccctggtctgtctagttctcatctcacctgtcatcctcctggggttaccagttccttgtacattaccaggtttttgtgtgtgtgtgtgtgtgtgaagtttcctttagagtctggctgtgttttaaaagttgagccctggacatgtgatccctggtatgtgtatgaggtgaggttgtcagtaaagggccattgacaggcctcctcatctgacccacccctgtccctgcttgcccactctgcatgaggaacactggccttcttgccacttttggaattctgggacccagaccacagtctttgcccaggggtctgcatggcttgctcccacaatctgtcctgccttttctcaacatcctgcccatgcccttgtttattagccactgcacctgtcacctggcttgatcatatacattgatcacttgatttgtttatggcccgtctatgtctgttagtaggaagcactgtgagagcagggaatgtgtgttgctatatccccagggcctagaacagccccggctcagaggagggctttggtaaatattgctgaatgaaaaaatgtctggaaaaagcctggttaagcagagttaagtgggcttatttaccatgggacttttcagaaactttagtaagtgaatgcgcatattaaaagtggggcctggcaggtgggaggcaaactcatcagcagagtaagaaaggcgctgtgcttctggatgacaactcagacatggggaaaagctgctggcgggaatggtattggcagctgagcaaaatgaatttacaagtttccttttcaaaatgcaggggaggaaggatttgcatcaagagatggtaatagtaacatttccattgttagttattacaaacatgtacaatgtgtgctatttatcttttatttaaggtggggaagggggaagattagggcttcttgtagattcttccttccctgaccctgctttccccataaggccttaagttcttcagctgccagttcatccttgtgggttgaactgaggaaccaaaccctctggcttggtttcagatcctgacatcttgacttgtgaaaatcccatttaatgactggaagtaggaaagctctgaagatggatatgcagattctaggggtcaggaggctctgttcagggcctgcgccatgaccgaagggagggcgtgtaggggctcaggttctgctcccaccattagctctagaggcactctgagagttgtcttggctccttgaacaaaggggagttaattacagaaaatgccaggctttttaaaggccatttgtcccctagctgtagggagagcagcagcccttggcagagccctgaggaaagactctttatgtcaggccgcagtcctcttgtagacagaaataatgagccttggtggtgtcatcctcagataggaggcaaaccccatggtgaaattctgtattcaaggaaacaatgcagagaatggggcggacttagaggagctggggtgaagtgaatttggaatgcctctcttttaaaaaaaaatggggcagagttttgtgttgttttccaaagtcagacaaagcctgattctacagagtctagttaaccgtagatgggagggctgtaaaggagagtaagatgaaggcagtgatggaaggtcttagattctaattaaacctcttttagctgtgtatttggaacacttgtaattcagagcatcaatagactctcgttgactagatgcttttttgctgccaattttccttcttaagatggaaggaggtggtgggagaatggcgtttatgccagaatgcctagagtctgcattttaacaagatccccagggggattcatgtaggcattaaaatttaagaaggggtgaggtcctggaccagcaattctcagtcccagctgctcattagagtcacgaacagagctcttaaaaaatgcctgggtactgcctccagagatttgtgttgtcttggctggggtattcttggggcccggggtatcactgtatttcttggaagtttcccaggtaccgccccagacataaagccagacaccttcaggtagatgtctagattcagaaggcacataatcccgaagcaaatgacaccatgcttagctgggcacaccactctttaggattcatcaaaacccaccacaccagataatgtggatcctcgtagctcatccgctggcttctagagccacagccagagatgatgggatgtggagcacccaaccggggttgcttgtgccgggttagaattctccctcctccatgaatgaaaatgaccttgagactgggcagtggctgagtgggcatttgctttttgtacctctgactctgctgctgaagaaactgtttcaaaatttaaatcagatcatgacatcaccacccctcttttcatgtaaaactctcttcaggggctcccattgcttgcaaagaaaagaccataatagccctggcaggccccatgttgtctggcctgcatctgcctcagcctgtgccccagaactccagccacatgggcctgcgtttagttactcaggggcccattcccttggcctggaaccctgcccttcaccttaggtaactgtgctgtcccagaccactctgcccaaggcacatcccattgtattttctccccacagcaccatgtccctctcacaccatcaagtaccactcctcagatagcttctttccttcgtgtgggcctgttagacgacaagctctgtaaggacaagaactgtgtgtgtttagttagggactcagggtcatatccttggcagctgttttactgcatgaatgaatacactggatactggataatgaataatgagcttgaagtcattatttttaggttattttgtccttaaacttgtatgcacatacacacctactcatgtttgagtgctgtattttgtaaactgtagagatattggacctgagggaagtgggtattttgagagagtactgggctgtagtcttactggttctgattggctcatgtaggatgtgacttgtagaacaagtcccagttttctaaatttttaactaggccgggtgtggtggctcacgcctataatcccagcactttgagagtccaaggcaggtggatcacttgaggtcaggagttcaagaccagcctggccaacatggtgaaaccccatctctactaaaaatataaaaattttccaggtgtggcgtgcctgtaatcacagccactcaggaggctgaggcaggagaatcgcttgaacccaggaggtgcaggatgcagtgagccaagattgcaccactgcactccagccggggtgacagagagacacactgcctcaaaaaaaaaaaaaaaaaagaaaaaatgcttattacaaatatttaaaatatgaattgtataaagtacaaaaagagctcttactgtcctctcatgattttattctatgtattacatatatgtgtctatgtttgtatatgtgtgtaatcatatatatttcacacatacatgatttttttaacaaatgggatcatacattccatcctgcaacttgtcttttttgtttactggtatatcttgacactttggatatggatctatgtcattggcttgcctttcatcatagagttttatttgaaatgaaaatgtttttggacttcggcatgatttcctaaaccccccaatcaatgtgttttaagtagtaagtgtatttgaatgcatatacatgctgtggcttagatcattttgttttcaaataatactgaagtcctcatagcatttggttgttttctagtctcagttaatggatattaaacatagaactgctctgtggagactagagaaatattttgaggttgaaagggggcctcattcttgaaaaagcctggagaccctcagggagagggttgggcaggctgcctcctgaagtacctttccacattcctgagttctagtaagttgctcaattgacacagtcattcagcaaatagcaattgttggctcatggtgcgccaggcactgtgctggtccctgctgtcctgaccagcatgagcccatattctgcaaggagagcaaatggcacatagcgagagcatctggactgtgctgggtgtagtggaggaagtggagcaaggtcaggtggcgcagagcggtgctgggggtgccacctgggtggtgatgaggcagagctgactcttcctctgctgcccatgggaaagggagcaggccctgcttaccccgagtgtacaagaagcccagtggccgggagcagctcctcagagagctccctcctggaccccgcagtgactgcccacaggctctgtggcctgcaaggggctctacagccagatatgggcatgctggcaggcagctgtgcttgaaatgctgataggggcctggggtgtaatgctcttctcaagagagtggttttggcagggctagggttttgcccctgaagctttgcaaatccacatcccccactggagtctccacgtgtcctggtaccatcccggggacaagaagcagggaaaaagcaggggaaggaggtgggaaccctgcagtccacccttctcctatcctaatggagtggccagggaagggactctctgtatatcttagtttagtaagagtttgcagaagtcaagttaaaaatggattttttgaaaatgaaatacccatgtgaaagaacacattggatgatacatggtcagttgcatgattgttgagaaggtcttctgactgatgagtgtgcaggtagctgtttgttcctgtggatgaaaaatgggagcccgaagagctcttcattgacacacccacagccacctagctagggagagggtgagtgtagaccagtccctgacctcctgcccgggtgaaagactagctacggagacggtgagtgcagaccagtccctgaccccagcccaggtgaaagactagctagggagagggtgagtgtagaccagcccctgaccccccgcccagctgaaagaagctaagagctcctgacttttaaatgaaaatccaatacttaggaaggcacatatggcttcaggagagtgcacctctcagttttcaactcatgtagttggagaaatcctatccctaggccacctggcttcctggagaacagaagaggtgctattcattttcaggtaaggcttcattatcttcccactttacctgcagatgagctcagtgggcgaaatcatattacattccttcagaagactagttccattggaaagatttgattcttaaactataaaaacctccaaagtgctgtcctgaggccgggcgagggtgatcaggggttggaagcctggagggaatgagcagagcaggcagtggaatatgcagttcccaggtcctcccgccacatgctctgcagagtcagcgcgtcacctgcaggagggaggcagtgcctcttatcgttgttccctttttcatagcactgatcctaggagagggtgggttgcaagccccaggacactcagagccaggacctgtctgtttagaattgcatgcaacctgcgtggtacatcctgttccttttactccctccccaacccaccctggtgcctctgctgcttggttagaaatggcctgcagctggcatttttcaggggggtgctctcactgtgacccatgaggatggacccccctgagtgcactgtcttagagggctgagctcagtggacttggtactgctgggccctgcatcctctggccacagtctaagcctcagtttcttgaagggaagttagcagttgctggaataagagtgtgtcttgtttttttctctcttcttggtgtagaccctactgtcgcattaatttctggcaaccacactgagaaaggtgtagattaagctggaaaatcacgaagagtgccaagggattggtcagtttttactgggggtctgcaccaggccaggtgggtgctggttttttgtctacattgtctcatttaatcctcatggccactctgaggtagtggtaggaggagggccttctattagagatgggacattgaggcttagagaggttaagtgacttatggagtcacagagctaatgggtgtgagcagggatttgaaccaagtctggggttctttgtgcctcactatctctgacatggagtggcggaaggaggaggggattgtgggatggagacaggagacaggacagctggcttgcaaggaatttggcatgcccctgctgggtggtgttgctgataaactacagtacactcggttaaatgtgaagttcagaaaacaacacataggtttttgtttttgtttttttttagtataagtatatgtaatatttgggacatactttatactaaaaaaattaactgaaattaaatctaactgggtatcctgtgtttttatttgttcaacccgacttggggaacctgggaaggacactgggcctcatatctgggcacaaaaaatactggttttgggggggagtataagtatgtcttatgcaatatttgggttatacttacactaaaattttatgttatctgaaattcaatcttaacttgggggatgtcctgtatttttatttgtctaatcaggcaaccctattggtgaccccaggaaacacacgaagccttatacacgggcacctgagggtggtttgcgagccatccggagaaaacccaggcagcttggcaggtggtgagctccccactgcaggctgtattcaggtgtggccggataactacgtggtgggtgtgtcatggatcctatttgcattccagatgcctggttcctgtgagattctaggatgtaaatgttgagacaaggagagtgattcacctgggtcttcatggagctctgacccacccagggttaggaggctctctctgaaattatttgccatcagcactgtgttgaggggaccacttctccctgccatgcagaagtgatggatggcctcagtcagtcggtggaagccagctcagcccagggtcttgtctgtacgtggagagctttggcttgaagaagcactgtgttaaaggtgaaatgaaacacactttcttgtgtcacctgccaagaactgacagtgacttcccagttctttatgtgcctcctgcaggagagtgtggcttctgtgccaggctgaggaccgacatgccccgtgttgctccctggctgtgacagcatgaaaaacacccacctcagtgttctacccaggccgctgctggcaagtgggcggaggcgagaagcgtcagtgttcattcctttgcttttttagagcttctctaggtgtggctacatcttgtcagccagtcagaattttaaacacagccagctcctaattgccccagcatggcttctgcccactatgaatgaccctcagctaaggcctagtccttggcaggcctcttcctgccacctgcttccagaccatcgtgggagctcactgggaccttagcctgggcccaacaggagtcagggatcaaatgtgcaaaggagtcttattctgtgttctgagaacacaaggaagtggtcttctctcattatcatgtctctccattagggtgttctaaatttgattttattattgaatcaatcatttatattattaattcaatatgaaatgttaaatgccaagtcaaactacctattgtagcagtggaaaaaaacggaaatatttgtgctgatacttactgactgaaatcacctgtcgttttcattcctctttgttgacttgatgtatttgtaagcagcaggggcatctcgcttgtgttttccaggaagagtcagtgaatggctgcggtgtgacaacatgcaccaccagtggcttctgctggccgcatgcttttgggtgattttcatgttcatggtggctagcaagttcatcacgttgacctttaaagacccagatggtacgtatgcttcatggtggaacgaattttggctaatttagacctagctgcaacactgttcctaggtacatgcatagatgacttctgtcacagagtcaaaggactttcatgccagcagggaccttggaggtcatggcctccgttccttcatgttacagaggtgtgaggggaggtagggtgggaggggctggagggtcttttcaagcatctcctctggaggaaggaagctgctctttgtggctgaggcctgggtggtgcctaggagcaaggagcagggtctcctcccagcagcacagtggccttatgccttgcagcagggcgcctctcaggctcgcagttgggaattctctttgcctcatgtcatcatgagaggtgcagcctcaactgcttggcatgcccgtgtggtggccacatgtttgaaggtcaccctccatgcagcggaggagggtcatttaaatgtatgtcttcaggttgtcttggaggctttcttagctctcctttactgaacgtaggcattcagatgaggacggataaagagcgccaaattgggtctcagaatgctgattctacttcgtgctcttgtcatttgcttatctacatcacaatgtttcttccaccaaatggacaccctgcctgctccggcaccgcccatgattgccctgagcatggtgaggtgctctgtggtctgtggagtgctggatatgtccaaagaggtgtgtgatatgctctccagccccgaggccacttcattgagtggccaagcaggcaagcacgaggaagccagacacatggagtcattgaagtcctcatttgtgccgtggattggcccattcctttaggctgattgggagatactggggaacgtggatgagcacagcactttgctgtgctctgcaccgtactttgtcctcctgccgatggtggccttggaaaggggcagttagagatgcctctgtgccagcagttcttcctggaggctgcactgacctgtgctgtctgtgtgggacaggcccctgctccacctcacagagctcccaggcatgtccctggctgtgtcaaggactgcccgatgtcctacacctcctgccccatcctctctctgccccaccttgtctgcagagggacagcaaggttagaagggaggtctgcagggaaaagagggacaccctgaaattagcccacatggtggttctccccatgacagttgttgggccctgattggctgtcatcacatgtcctgcctcatcctccaggagccctggagagaaacctgtgaggtctgcacagcctcgggaggtgatattacacctgcaggtatctgggcaggtgtcactgagcatgacagctcacgcccgggactcggggttccgtcagcagagcaagggtcgattcttggagggttgctggaatgtgacacgatgatctcagtttgacagtttggacatttccatggcagcttcagcacagtgccatgccactgagagatccctcctgaagccctagagccgggttctcatccccgcagcacttcagaatcacctgtgggactttacagacctgctgctgcttgagacccagtgaaggagaatcactaggggtggggcccagttgagaagcacagtggtagatcctagctggagaactgaagagaaacagagctgctgagaataagaaataggtgttactcaggattctcctaaatgtcacctcctggtatggaaggcactcaaaaggcaggtcatgaggttaaattgtttatggtttattttgcttaaaaaagtaggagtagatgtaatacattttagtgagacttctataggtaatagttaaataagacttgtgcctttgtgttttactgttatctggcagaatggcctctaaagaatgccttgtttcccagcggcatctggtaaatgaggtctcattctcctttgatgtatcaagttttgtgctgaatgttttcagtgtagacactgatcctggaagctaagcaggggtaggcccggttagaaaaaaagcaagtgtaggcgcagaacagggttttgtgaagcggagaaaaggagtggtaaggagtgttaggagataaaacctatgaagaaagatgaagggctttcggattttacacctggagaggagcaccgcagcggtccttaatactgcctgtgagatctttccagccggctgccttcaggcgagtgaaagggggcactttccctgccctgtgagatctggtgtggtgtgtgggtgctgggtcactgagatgggagtgctgcccctgaccccgaggcaggggctgctggtggtgaggatgctgttggccgcacagtgtgcagtgaactcagtgagaatcttctgttgtgggcccactcccgttgcggggtgaccaccacagcactacccagcctgcctcactcgcgtgagatgttacctaattgtcccaagggacctggttaggttaggatcctgaaggtggatatccgccagctgagttctggatgcaggatgcgagctggcacccagcatcttgccagtgcacaaggacgctgggctgaagcatcaagagcatttacactcagagcctgcccctgcaggcgtcagagaggccctgggctggggtggtgtaggcctctcccctggagcctgcccttccagcactgtgctttagagagtgtgtcccggagcctggatcttgggcagcacaggaacccctctaagctcgtggccataaagggcttctcacatgttggagtttatttcacacacgttcacggtgtttttgattatgaaccagaagcccattgtgaagtgtcaagaccaggaaataacagacacggcagtgtccacggtggggagttccatttcctggaaagtgcgtggagaagccttggcctcagtgctcccgggctgctcctttcagctctgtcctctgggacagggccagcctcagaacccccatcagtggtgtgcatgttcttctcacctacctgcctttcccggtttctcctgccactggagcccctaggaagagcatggttgtcgtgagttgctgtttaaagcaacacttactttttttagtgttacagtttctgttcagctcagcagtggagccagtgatatttgtggcaatgatttatcctcagttagcaaatttcagtatcatattgaactaggatcaggtgttgtaactagactttctcataagaaaataaatccccctcagcgaagggaatgtgatggaatcatatggcaagactcaaaatgatgcccttgtggacctggtttgtgtttgtaggcgctggtttttcctctcctggttgacttcctcattggttctgagccgcttgagggcagagcctgtgatgtgaaggtctctgcagccttgaccatctttgcatgtacttatttgccatctgcggatactctccagtgaaatgtctgggtgtatcgtacctattttctaattagattggttggttttttaattgttgagtttgaggattctttatatattttagataggagtccttggtcagataagtggttcataaatattttttccctatctggagcttgtcttttcctcctcttcaaatgggctttcacagtgtagattttctctttggttgttttttaaaaagattgatggttttatgtttcacattcaggtctgtgatccactttgagttcattgttgaataaggggtgaggtttggatcaaggtttgttccgtgtgtgaatgtccaggtgccccagcaccatttgttggacagactgccctcctccgctgaatggcttttatggctttgtcaaaaggcatttgggcatctttgagagcttctatttctggggcctctgttctgtcccatccacctgtgtgccttttccttttagagaagacattcaacctctctgtcttccagtgtacagtgccaaacaggagtttctgttcctgacaaccatgccggaagtgaggaagttgccagaagagaagcacattcctgaggaactgaaggtgggcacagccaggccgtggtccttgtcctcttgaacacggcacccttgtcgcggggagctggccttcccctgtggctggttccgcttgtcatcacgtctgcgttagagccttttcctgtgttacttctccatgttagttcaccttgttaatttccatttgggagaggcacaggtcacgtctatttttgtgcccctcacagagctctgtgcatcagggctgctctgtcactgttggttgtgcagcattcctgaccagctgaacatgagccttgcctggggagccgagagtattgggcagggtcaggaggaaaccagaagtgggagaagacatctcacccagtcatggggttttagagtgaaagggggccctggacagcagaacaactaattcagcctccaaattgtatggatgagagaactgagcctagaaaaaaggtggatcctccacagtcccatggagttcctggcggagcccaaggctgctgacttccacccagcccttgctggcttgacattctggctccatggctctctgcaggcttcttgtgcacctaaattcctgatcattccctagctgggatgaggggtgcactctggaaggcctctcacttcgtaacccccattctggatctagagggttgaagttgcaattgttccagaaggaatgaaatgggtacagcgagccctaaaaatatttttagcccagaatcaagccgtagaggttgggacagctcctatccatgggtcacagtgtaaggatgataaattagaactcaataaacatagaaaacatacaccagtcagtagagtgctgctggaggttacttctcgtaggacattgatggaatggaggccaagtttacagaactctgagacagcctaaatgttgcttttaggttgaggcatcccagggtaagaaaataatttggatggggtacagaaacgaaaccaaaaaatcttatgggaaataggagagtggctttaataggatggatttaataggaaatcaaagttacatggataaaaacaaaggtagggtaagcctttggcaaagtgtcgcaacaaggttccctcaaggatgccataccctgtgaggaagagggtggtcatcttggtgctccctctccgggtggagggtgctcccggagagattgccagcctgcaggagtcattgcaaataaaaagactgcgcctgaatgtgctttacagtttgcagtgtactttactgggtttcaatctcattggtcttccgagccgccctctgaggtatatttttattctgtttgcatttgggaaacatgaggctcaaggaactgtgctcactgggtcagtatcccctggacagcaagttgtgggcctgggctttgaactcagtgtcctctgtgcccctctcttacccgctgccccagtcattctcatgagactcagatgggaggtgagggaagtgggggatgtcagaggtgatgtccgctgaggccacatgccgttaggtgacaccaaaactcagcatgtgtcttctcacaagaaaggggatttatcaacatgatcagattctgtagctcacctttaaaagtttattttggccaggtgcggtgcctcactcctgttatcccagcactttgggaggccgaggcgggcagatcacctgaggtcaggagttcaagaccagcctggctaacatggtgaaaccccatttctactaaaaaatacaaaaaaatagccaggtgtggtggcatgtgcctgtaatcccagctactcgggaggctgaggcaggagaatctcttgaacccaggaagcggaggttgcagtgagctgagatcgtgccattgcactccagcttgggcaacaagagcgaaactcggtctcagaaaaaaagtttactttgtgcatggtgtagccgaatgtttgaatggaaaatagaaaataatatttgtctttaagttggctttgtatatttccaaagggaaaaaagaaaacaatgctcattcttacacacaattgaacaagaaatcttttttctttagctgggcatggtggcttacgcctataatcccagcactttgggaggctaaggcaggagaatcgattgcgcctaggagtttgagaccagcctgggcaatatactgagacctcatctctacacaaaatacaaaaatcaggtggttatggtggtgtgtgtttataaccccagctacttgggaggctgaggtgggagaatcacttgagcccaggagttggaggctatagtgagtcatgattgtgccactgcactccagcctgggtgacagaacaagacctcgtctcttagaagaagaatttttgtctctaatgctttgctaaaagaaaagcaatatctaatatcttttctttgttcaaagaaaagcagtatctaaaagtgcagagttttctgcattttctaaagggaacttgttgggaggtgctctctcctgatgcgctgttcttgagtgccatccatgatcagggttaggtttggaacagagagggaggagaagacagagaggctcttttgggataagtgagcaagaggtgggatggatgaggaaatgaggttaaacgagacccgttcttgtaagagcaaggagagtgcctggcgtggctcctggttttccatggtgggtggagggcccgggcagccgctgatgccctgtggggaggaacggaggccactctgcaaaggggcctctcgcttccccagtgtcttcatctcgaaaagcaggcagtcagtagcccccaggatgctcttcccaccaccagggaatcccaggaaattcacttaaacacacaagggagaaagcatcctggccagaggtcatgagtgtaagagagtttggttacagtagatccataaaggaagagctgggtggggggccctgaggggggacctctgtcatcctgatagttccagcgtcccggttctagtgtgttctagaagtcttatgtccttcccattttctaactgacgttgtcccctgggaggacaggttgttaaaactaccctataaatggatttcctggcaagcccagtgcattttaaaagatataacaaggatatttgggtccattcaatacaattatttggaaggatcatctgctttgaaattttgggaagttctgtgtagctttaagagatagatatggccgggcgtggtggcttacgcctgtaatcccagcactttgggaggccgaggtggcggatcacaaggtcaggagatcaagaccatcctggctaacacagtgaaaccccgtctctactaaaaatacaacaaaaaattagccaggcatggtggtgggcacctatagtcccagctactcgagaggctgaggcaggagaatggcgggaacccgggaggcggagcttgcagtgagctgagatcgtgccactgcactccagcctgggccacagaacgagactccgtctcataaaaaaaaaaaaaaaaagagagagagagagatgtagcagctgaagccttaaaaatgctgagaaacagggccacaactagagggggccgatggggttggtggaggctgccctgctattcaggaatgccctcaggatgcctccagagaacaaggaggtgtgagcagcaaggggactttaactcaccgaggacagggggcctctgagcaacttctgtgtgtactggcacatctccctgtgccccctccaacccatgcacacacaaggcctctcacattacaggtattctcttaggttctaaaacagccctgaaaagaatggaccagcatgtagaatttgagctttttcatctttttccccctagctagaggattccaaacttcttactttggtttttaatttcttttttcccccaagacggagtcttgcttgctctgtcgcccaggctggagtgcagtagtgcgatcttaggctcactgcaacctccacctcctgggttcaggtgattctcctgcctgagcctcctaagtagctgggattacaggtgtgcaccaccacacccagctaatttttgtatttttagtagagatggggttttactatcttggccaggctgatctcgaactcctgaccttgggatctgcccaccttggcctcccaaagtgctgggattacagacatgagccactgtgcccggccttattttgttttttaaagtcaaacttctctccaaagatctgaggaaccaagcttgcattcattttccttgcccagcctgccgatcgggctggtggagaggctctgaaggcctcatgaaggggctggggatagtgggtgtcactctgtagacagacaaggaagggaagaagagaaggctccagatggaaaggaggggatagaccagcaggagcggctctgcttggcccggtcctgcctcctttaatggtccctgggcctcttctgctctgtgtcacctgcagccaactgggaaggagcttccagacagccagctcgttcagcccctggtctacatggagcgcctggaactcatcagaaacgtctgcagggatgatgccctgaagaatctctcgcacactcctgtctccaagtttgtcctggaccgaatatttgtctgtgacaagcacaagattcttttctgccagactcccaaagtgggcaacacccagtggaagaaagtgctgattgttctaaatggtgtgtgtgggtctactgaatgtccactgggaagggtcttggtggccggtgctgaggaggctggggaggacagcaaggaggagtcacaagagggctggtttgacctgaagggactggtggccgtccagacaggcctgtttttgttgtttcctgttagtgttgtgccttacaagttagtggggctcgtttagacaccgattcttttcaaaggggcacagccacagtccagctctcctcacctgtcacagcagatcctcactttaggtggctcgcccacccccaggcccccctcctttgtctcttcaggttccctgtgctgatggttatagtcacccactctgtccgacatccccagggccccacactcgcagagccaccaggaagcctcacggtcaccctctctgcagtgagaagggctcacactgtagagcctgggaggggagccctggcccggggcctggagcctctttacctgcagaccaagcgttctgtgccagcgagcaggaagaaattgtaccccatttcacactaagcatctgtgttcagaggattgagtcagcttgcttcaggaaacctgatgtttgctagggaacaaattagatcatcacaaagtaacctcatacactgcagttttgattactcactactctttttagagatgtctatttatttaaattccaattagtctgaaccgatcctaataattatgggctctgcttatgaaatttagcttcagacaggagttagttccagtcaacagcagtgggactcctgggtcagaaatcggattttggggcaccatgggtaggtggccctaaggctccatgtcctgcttgccactcctgatgctgcccacagagtcggtggtcactcctggccactgtttggccttcgcaggggttggctgggagagagaatggtggcacctcatcatctggttgtcacatataattaatgtgcttctgcagtgattggatagcatgttgggttttcagaagcagaatgaggctgcaaatcgaattgaaaacaaggaatatacaaaggctcacaaatcagccaccacagtgtgaagcagcatactttaagaagtaaacacccacttagaagggcagcatagaaatcagagtgggcttgctggatcatgtaatacagaagcgggtggtccttgtggctatcttcggtaaccactagtgcacctggatggggacaggtgcatgaatgggcccatatgtggacccacagagctggttctgtcattgtccccttgagagcagtgctccccacgcctagtttacagccatccatagcatgtaccgcagagttctggactgggctttaaacactcgggggaggaatcaataaaacagacaagactgtgtccactggtcagatggcccagggagattcttccctgccaggactccaatcttaaccctaccggattaacacaaagatggatattaaggcttacagaaacttggagaaaacctcagcatactgacagtgtatttccatttgtctgtattgagaaaagagtgaaaaacctgctcagccaccaaccctaggatggtctctgcccaagttccattcagcagcctggacctgcactggtccctgatgacagaccctggctgttggcacggccctgccttctcgacataccttgtcctcttttgactcctgtctcaaatgtatcacagctcccatagcttagtcagatttttccagcatcaaaaggtctttgctctttgccagcctgggatgctgctggggtacctgagagccactgtgggccaggggcatgtggtgcttggagagcttagcctgtctatgggatggggctgtgaagctgctgcgggcatctgttagcatgacgttccaaagtcctgcttctctggcattttcccccagtctcagagtagagtaagtgttgctggtgttaggagttctgtttgcatgcagcgatcttcctctaatggcagatttagcccagttaggtccattgccaggggtaggcactgccagcatttccactcctgctccctccccctcctccctgaaatcatcagtttcctctagttggcttatggattcccagaagcttttcttcactcgttcatcctgctggcagaagcagttgaaattcaaagacctaaacttggatattgggggtgggcttgtcatgcacacgtggggaacatgaggcccaaggtaaagatgaggtaaggacatgcccttctctaaggggcgtactggagcagccaacctgccttcctttccgtttacttcccaggagcattttcttccattgaggagatccccgaaaacgtggtgcacgaccacgagaagaacggccttcctcggctctcttccttcagtgatgcagaaattcagaagcggtgagaacagcttcctcaaaggggaggggggagtttttgtaaacctgagaagaaatttggggaaaaccccaggctgagttctgtacttggcagattgatcggaggaccacagagggctgtcggtttgcatcagtgagaggcagctaagctacaccccccattcggcgcctcaaaactctcagttccttctgagaatttccagccttaccttcacacagtccattaacatgaaggtgacatcattttgttaatagaaattagcaggcaactttgttctgctttggtaaagttttatagattgcttgctgaatatgatcttttctttataagaaagggatttggattgcagagatctcactgagtatttgattctcccagaggcattgtgcccactgctgtgggagctgcccctgcagtggttgtgtgggctgcatccagcatgggcagggtagagagacggaacccctgatcgcagcaaggacggagtccaggctgggcgcagtggctcatgcctgtaataccagcactttgggaggccgaggtgggcggatcatttgaagtcaggagttcaagacaagtgtgactgacagaaaccccgtttctactaaaaaaaaaaaaatagcccgctgtggtggcacacacgtgtagtcctagctactcaggaggctgaagcaggagaatcgcttgaaccctggaggcaagggttgcagtgagccaagatctggccaccgtactctagctggggcgacagagcaagactctgtctcaaaaaaaaaaaaaaagaagatggagtccttagctaatagatgagaaagttctcatgtagtagctctcaggtggcccaggagagcaaggctgaaaaggagtgaggatgcaaaagcagcggctcacgtcaggtcaccagctggattttgcctcctgggtctgcagccacctgccttgcatggcgcctgacctgcatggcacctgcccatccttacaacccttaccagagatgctcctggtgaggagtgtcctgctgttgccctgagcactcatggggcttttgtgagactcagtgagtgaagacacggcaaagcacagagagcagtttctggcctgtcgtaatcacaccgtgttctgtgatgtcactgttgtcatcgtctttgtcatcgtcactgctgccggccctcctccccagggccatgctctgctgccgcccgcttgcagctcacccagacctgctcctgccctctggagcgtgaagcctgactctctgttttctcttgccccccttcccctggcaatttgaattgaacttttaaaaatatgcccttaaagtaactttccctggcaccatctattcctgactcagagttcctgcccttatgattttctgcccaggaacaaaatttgtaaacattcttgaagttttgaatcattcaagtaaaacagaaggtagattaaatagatgtcttcacagtgactgcctacaatgagtactgtggccttggacaggtaaggttttccaagcctctgttttctcacctgcaaagtgtggtaataacaggattaatccacaggatcttggagtagattaagagacgtgtggaatgcattcatggcagcctcggcacgtgagggtcccatacacagtgctgcactccgctcattcttccctctcccgccccctcagctgtgacctcctgtggcatcaagttaacctcttgttcgtttttttccttagattgaaaacatacttcaagttttttattgtaagagatcccttcgaaagacttatttctgcatttaaggataaatttgttcacaatccccggtttgagccttggtacaggcatgagattgctcctggcatcatcagaaaatacaggaggaaccggacagagacccgggggatccagtttgaagatttcgtgcgctacctcggcgatccgaaccacagatggctagaccttcagtttggggaccacatcattcactgggtgacgtatgtagagctctgtgctccctgtgagataatgtacagtgtgattggacaccacgagaccctggaggacgatgccccatacatcttaaaagaggctggcattgaccacctggtgtcatacccgactatccctccgggcattaccgtgtataacagaaccaaggtggagcactatttcctgggcatcagcaaacgagacatccgacgcctgtatgcccgtttcgaaggggactttaagctctttgggtaccagaaaccagactttttgctaaactaatgcataagacctatgaattcaaatatctttattagacctggggctaaccaggtgaagatctgagcccagaaatgacccttcctccaccacacccctcctttgaggacgcccggggtctcccacaggcctgtgagttgcctcggcatatgacgcagaaccccaactgttacaacttagtttggatgtaagatgctctgaggaccctgcccacacccctgcgtgcattaggatgtcgctggcctttgctcacctcagaggggagaaaaggctaaagatttgcagtttgacagcccagcagggaggaagcatcacacagcgttaggagccgtttccttcaggtgttaaggaaggggatgcccctgaggttctcctggctagtcagggtggcttcacccatcactggtgggttgcaggaacagcacccaggactctgaggagggacagagaagcaagggggctgctgaaatcgcagagacttttgcagcatcagatctgaggagtaaaacggcacctctggccttcatcttggtgctgcgacaattgtggaggcaaagcattctttctgtgactattttgttcctgtagacagtcagcgatggccagagggtggtgtggtgtccaggggtccatctttccagaatccatgcctgtgtaatgctggtccatgcttctgaacctgtgtctgccaagcgcctatttcattcagcacaagacatacgattttagaaggtgaggggaggggaggctttttctacctgagaaggggagtgtctttgagggccttaaaaggaccatggcccaggaatgggggcgctggttgggcttggagctcaggctgctgtggatcccggcgcatcagttctgacttgccttacctgggtggacagcagtgaatctccacctgtcttctccagggagctcccatgttggggctgaagacgagcaggggcaacctgccagcatcacagaattcagtgtagtttatacatttcgattcctttcatctcagcaaaatgggcactgccagagccatttctgatcacaccaccatcctggaccatgtgactggaaggtgggtaaccaagttcaccagcaataaaacccagcgcccaggtagcctccagcagtgcggcttcctggcaacaaggtaggccctggtgcagggcaagccgcagcgaccatttcagataccgtccacagccaggaccgctgagaactgggacagtttcctgggatgagtgccagcctgagcctgcatggtgccgccgagcccggggtggaggagggagccaggcttcgcttcaaggcggcctctaccttttctcagaatggtttcctgattgtgtcaatgtgaaagttaaataaaatttatgtgccaaacctgacatgagctgcggttctgggaagggtgcctgtggccacgcgcgccccaggcaggtggggtaggcatgtgcgcacgcatgcatagctgctcagggtaagcagaccgcaggaggcccagccttcagccgccatggacacgcagggccgaggacgccacactgggttatttttctgtaacgtttagcaaagtcttgttacaatttcagaccaaatgagctgattgattacctctttgctgtttggaatctaactgtggatctgtatatgaatggaaggccttaaagctagtcttaattaaaatagtgttttccctcagaaacaaaattctggcccctggggtggtctcttcctcccctttggcatttgggtcattttcctaacatattttgccacacaagtggagattgctaccatagtatctcctggacatctcactgtgtccacagcaaggatgccgccaagcacggcagcccaccccgttcatttctgcacagccagtacccccactcccctgtcccctgacttccttctgaggctccagatccactaactccctcctcagcttacagcaggtggtgcacctccttctgccccctgaggcaccaccatgtggagggctctgctaccctgtctgggcgttcctcaggactgggctggatggtggcacagctcattcccaggcagtgacaccagggtgggggtggctggagtaggcaggcctagggggacctctgcactaacagcctgggtttgagagaaacaaacagcgaccctgcctccaagaagtgctagggcccggagggcagttcctaaattaggaagtttaataatacgaggttgacttaatgggtttgtgttttagaccgcttctctcctactggatttcactcctagcgcgtgtcaggtttattggtcttgtgttgagaaccactacagagaaatgcccagagctgagatgagatttgattttcacagtggctgactgggtgcacacgaaggtgtgcactcacggcctgcagggcacccaggtggcctctgccctgggttcctgaaaagaagagcctctgacacagcactggggggggtcctccctttcaccccccagctttctcgctctaaaccccggcatgctttgctcatctggaatctccagaagcagggaacagaaagggaaaaatcaagacagcagctaaatgtgaggcgaaggcagcctattggactaaactcaaattatgcagcatagtttcccaagctcctcggacatgccgagaccctcagcaggatagtgcagttacagggctgagcagaaccgcaggctcataggagatgagaggcctgggaagtgccaggacaaggctgcacctatccagcttgagtcaggaggcttcaggcaggtgaggtagccacacttggggagcattacagaagggttggccagaggagaggatgcccagggggatggaagctgcatccaaggtatggcgggtcggctgtgaaaaatgtgggcgcccagacaggaaggctgggcagcatcacatagggcttccaggggtgtgctcttcccctccgggaggaggggcaaacacaaggcaaccaacagctgtgatgattggggtgatagggggttgtccccaaagctgagggaggagcatgcaccagtacagactcacacccctacagcaagtagttggtgcctggaggggaagggcaggtagcttgatgtgaccaggaatggctgtgctctgcaagtttgggtgtcatttgggtaataggggctctggaggatttattttttctttttattatataaatttaaaaatatatgttggctgggtgcaatggctcactcctgaatcccagcactttgggaggccaaggcgggcagatcacctgaggttgggaattcaagaccatcctgaccaacatggaaaaaccctctctctactaaaaatacaaaattagctgggcttggtggcacatgcctgcaatcccagctacttaggagtctgagggaggagaattgcttgaacccgggaggcggaggttgcaataagccaagatctcgccattgcacttcagcctgggcaacaagagtgaaactcattctcaaaaatacatgtgtgtgtcaaagtgatcactgaactccaagtagctctcagcttcaaccgtttgtttttttgttatgtttgttttgtttttggagacggagtctcactctgtcgcccaggctggagtgcagtggtgcgatctcggctcaatacaacctctgccttctgggttcaaacaattctcgtgcctcacccccctgagtagctgggattacaggcatgtgccactatgcctggctaatttttatatttttagtagagacagggtttcgccatgttggtcaggctggtctagaactcctgagctcaggtgatccatctgcctcagcctcccaaagttctgggattgtagccatgagccaccacaccgggccccacagtttttgtataacaaattccctttctcatttcatctgccccttgccccactcacttaccgtgacttgtatggtgcacacacctgagaagctcagactggggatttgagtcccagtactttgacaccagagcccacagcattgactgccagctacattctactgactcaaatccattttttttaaccctgctgttctttggttcattgcccttcattcatctgaccaccccaccaaggcccccaacccagtgcctcccagcagcagctccccttggcttctcagcttgctctccccattcaccatggtgtctatttcaacattgtccatttttctcaaacttccactccattctcatttactgtgggcagatgaccttgtccccgacagagggaacaggtgccatcagatgagcattctccaacatactggctccacacctgcaaacttcctgtatccacacatcctctcccccttctactacagtgggcggggcttgcctcccaccttgctctgcacctccccacatctgttccgaattaccctcctgctctagtgccagctcctgtatctgcaccccttctccccactgggctctttcccggtggcattcaagcacgttcagggctctcgaatcctaagaccatcctgccttagctctttccccatcccacatggggccctgccttacctgtcacccccactccatcttgaatctagcagttttcagggcagtcagtcaattttccagattcttttcttctgtgcatcctttaatttctattgcttcccagtattcttagctcagttcttttctgtcaccactctctctgggcaaggaggcctccctgcagatcttcagttaccatctgtgtggaaataagccccatggggacccaagaacttttgtgtgttttgtccgctgtggtagcacaactctctaaaaacagtgcttggcacaaagttctcaagacttttcgaatgctgatttagacccaagtttgtgccttctgtctgcatgtctttttgagcttctgacacttataccacctgcctactaggtatttcctcctggttgccccacactcatttcaaacttattaattcctgagcagaaccttcatcttccccttcaaacctgttggtttatatgtggccatgatttcagggaacagtgacacaaaccatccaggtgtctgaaccagaaatctgagtcagaatcttggacaactccttcttattcactcctcacatccaatcagtcaccacttccagtagattcaactatttacaggtttcgggttcccggccacttctttccatcccttttgccacctctccagtatgggccactagacgtcccaggcgggccacacccacaaacacagatgcctgccctgctgctccccctgcctctgcctctgattttggccacctgcaatcatttctttcttttttttttttttttttctgagacagagttttggtcttgttgcccaggctggagtgcaatggcgcgatctcagctcactgcaacctccgcctcccaggttcaagtgattctcctgcctcagctgcctgagtagctgggattacaggcatgcgccaccacaccaccacacccggataattttgtgtttttagtagagatggggtttctccatgttggtcaggctggtcttgtactcccaacctcaggtgatccgcctgcctcggcctccgaaagtgctgggattacaggcatgaatcagcatgcctggccccacctgcaatcatttctataccccacagctagagtgggttttgtcaaataaaactctaattgtgttgctccttagctgaaactgttaaatggctccccattgctcttagaaaaaaagtccattttcttccacataaagtacaaggtctttaaggatttagactctggttcctctgcagtctcatctctcaccatctccttcactttcactccatgcccaacccataggctttggctgtagccatctattctcatctccatgagtttgccatggcctcttgtcatctccagaccttgtcacaggctgttccttgcaccccttctcttcaggtagctaactgctattcatcccttaatatccagctcagaaagcatttaggaactcttaagcccaagatgcccttccttgagatacaattcatcctggggcaaaattcctgtccatctgtgaacctatgaccagataagttacgtgcttccaaaatacaatggtgcaacaggcacagacatcctcatgccaaaagggagcaatcagaggaaagaaagggatgatgggtcccaagcagttccaaaacatagtaaagcaaatcacattagggtttatggcttaagattaatcttttttggtttgatgctctgccctccagacccactggagcagtggtctcaccttccagaaccactggggtggcaaagtcactcccatgacttggcctgttgccccacctcctatgttgcccatgctggtctcaaactcctgggctcaagcaaacctcccacctcagcctctcaaagtgctgggattacaggcatgagccaccgcgcctggcctctgctgtcgttagtgtcagctggcagtgtttctgttggtatcatcccatttctgttcctggccatctctgttgagatggctggttaggtccatgctccacacccacactaatctccttatcaaatggtaggtcagccatacccttgttctcttctgaacatgttttcttattttttgcaacatagactgagaatctcaaaatcttttggctctggttcctttttgcttaataattcagtcttcaagtcatttctctcttcttgcattttactacaaccaatcaggagaaaccaaactgcttcttcaacactacttagaaattgcttcagctaagtacttaatgtcatcacttgcaggttgtaccttccacaaaacactggaacgtcaacataagtcaggcaaatcctttgctgctgtataacaaagataacactttctgcattgtgcgatgtcattttcctcacttctgtctgcgacctcactagaatgacctttaccttccatatttctaccaacattctgttcataattatgtatatattctctaagaagatggatgctttctgtacagctctcctcttttctatttttttttttttttttttttttttgcaaaggagtcttactcagttgcccaggtggagtgcaatgacgcgagctcggctcactgcaacctctgcctcctgggttcaagcaattctccggcctcaacctcttgagtagctgggattacaggtgcccaccaccatgcctggctaatttttgtatttttagtagagacagggtttcaccatgttggccaggctggtctcgacctcctgacctcaggtgatccacctgcctcggcctcccaaagtgttgggattacaggcgtaagccaccatgcccagcctctcttttccatctgagtcctcatcagaatcacatttcatgtccatattgttagcatgcatctgaaacttctccattatctgtacatcatccgtttccaaagctgattccacattatttgttacagcagcacccacttcttggtagtaatttcttagtctacttggattgccgcaataaaatactatagactgagtggcttaaaggacagaaatttatttctcacagttctggaggctgagaagcccaagatcatggggttggcagattcagttcctggcaagggctctctttctggcttgcagtcagctaccttctcaccatgtcctcatgtggcagagaaagtgctctgatctccctcctcttataaggatactaatctgatcatgggttcctatcctcatgacctcatctaaacctaattacctctccatggccttaccttcaactaccattgcactgaggattagagtttcaacataggaattctggggcgcacaagcattcaggctataacactatgtgatcgtcagggcagggaatatttacatttgccatagcagcacccaagcctgaaaacaataggtgcttcatgaatgttgaattgacttgttatgttcatgcggatatggcattttctatctggacattcactgacctccttggctacccatatattgtataccttggcatggatgcagcaaccactgaatcttcctccccccttcccctgctgccaggattcaactagggaataagatattaactgaaactccttctaccctcaccctattccaaaaccctatcatgaacagctctcacccgcccttcctgtcccataatttgaggatggggatgaggaaaaataaaagatcattcccacagaaaagtggttgccaatttctaaatgtgtattttctttttctgggccatctcttgccttctcccttagaaaagtgccagatgtaaaacaacaataggaatttgcactttcattaatctcaaagtaacttaagtgtaagatatactttagagatctttgcacataatatcaaagctgtctatgaacattgagcagctcaactcatgtcaggccccactgctttggaaataaaagacatgggaatctcatctcgagccagccaagttggccgtgctccaccttaagacctggaggcccagtgagttcctccaggcccagaggttctaaaggaagaggtagctatgcctgcaagctaagccggaatggaatgggctgagcataaccagaaagaagaaagtatggccacctgtctccacactggtcctggtaataaaatttgtctacatgtagaggttagaaatggtgctttgtggctggatgagaatgcgctttaataagcattcattcaaggacttcatagaaaacccactgagaacccaggtgctaaggaaggaaaagagaattccttttaccttcctcctagatcccttatgcaagaaatagacttggagcatctggcttccaggccctttggttctacactaatacatttactccattttgtaaattcagaactagtacccatgaccctacacgaataagtgaatgggctctgggccttgcgtttttcagaaagtgaattgccctcaaaccctcagttttcaccaagatgttgataaggaatgacaggttaaagtatttgctcagtactcaagtttgaaagtaaaaactagcgtaggacagaatgtaccaagttaaccaccagggaagtggatcctgtcctgttatccaggaccaggttttattaaatgattcatagaatcagatccatttattccaagtagactggaaatactcgtgtcctgatcctttttgtatggttgaaaccacttcattagacatgttgcaatagtaaaaagcccgattagcttagtgtttactcattttatttctcagttatttaatattttgttttccttaatatccatgatgtttgtctctggtgttctgatgtaaaatcatagtgtgtattttttacactaatgttgaaatctgaaatatatgcacccatctttaattttgcgtgatgtgttttacgtgctattcctttctcagtgacagaaatgaacagaccagaatttgtgggatttgggtacaggatctccataagctgagaatgcccctcttgctgttgctgccagactttcggaggctctgtggctgagccccagactccttactgtttggacactgacgtgggctctggcctctgcattttccagaaccccagagagacctggaaagtcatcctcagcctccattcctggtcacagatgataatgtagaactggccttagctgtctttcctgggctctggctttctgccaccttggactttgctactttctgtaggacttagtagcacctgccatactctgccactccctcccctctaggctgagccctgtctcacagactctgaacaatacgaggcttttgctgcccaaagtttgtcatgattgatttaaactagcatgccaaaaataaattcctaaaagtcagtaagtcaacttaataactgtgaagttcagttatcaaaaacttatattatttttagggacaaaatcttaataacctggaaagatagatttttttaaaattagtttttgttcttcagcttaactgacacgtaatttacaaaacataaattttaccttttataagtatgcagttctatgttttagtaaatgtacttttgcgactattactacaatctagttttagaacacatttgttacccaaaaaatctcctaaatacccatttgaggtccagctttaggcccaggcaaccactcttcttcctcctgtttctgtttttgcctttattagaaatttcacataaatgaattaatatgatgtataaattcttgagtatggcttttttcccttagtatagtcttttagatccatccgtattgctgcatgtatcaatatttagttcatagactgggcgcggtggatcacacctgtaatcccagcactttgggaggccaaggtgggtggatcattgaggtcaggagttcaagaccagcctggccaacatgatgaaaccccgtctctactaaaaatacaaaaattagccaggcatggtggcaggcacctgtaatcccagctacttgggaggctgaggcaggataattgtctgaacccaggaggcagaggttgtggtaagccaacatcacaccactgcacttcagcctaggtaacagagtgagatcctgtctcaaaaaaaaaaaaaaaaagaaaaaaaaaaagaaattagttcatttttactgctgtgggaattccattatatggagataccaattttatctattcaccatttgatgaacatttgggttgtttcccaggtttggctcttatgaataatgctgctatgaacacttgcatacaagacttggtgtaggtatatgtttccacttccatgggatacctaggcatggaattgccggtaataaatatgtttttttctaatgaaaagaaaatcaatgttatggcttttccaaagggcaaaactaggctgaacttccatgttacagagagaataaaactaaagaattagccataggcaaattgcactgataaattatctgaaaactaaaaggttaattataaaaataacagcaacatattttctagtctacagttgatccttaaatattagtaattatggccgggtgtggtggttcacgcctgtaatcccagcactttgggaagccgaggcaggtggataacctgaggtcaggagttcgcgaccagcctggccaacatggcgaaaccccatcgctactaaaaataaaataacataaaaattagccgggcatggtggcatgtgcctgtaatctcagctacttgggaggctgaggcaggagaatcacttgaacccaggaggcggaggttgcagtgagcggagattgcaccactgcacaccagcctgggcgacagaacgagactccgtctcaaagaaaaaaatatatatgtacatattagacaattatgatcaaaagctgtagacttctagaccagagtctagaagggtgtggccatgcttgccctgggcagccccatgacagctgatgtggaaagcgggaagaggctgacaatccttctccccagcatgtctgcatgaagccttgtgattcactttcaccaagtacctgatgtttcacaattccagcattcccgttaatgttacctcccattgatcctaaaaagaggcaaatatgaagatgtatataattttggataaatcaaaggtggttcctgaggaggaaagtgtccagaacctctgatctgcatagtattttacacacttccaagcataagaagatgaacagaatggcagaagtgagagtacccattttacagtgaggggcatcaaagaacaggaagtgcaacaaatgagggaggttcttgggctaccattcaaagctatccacttggaagtttctctgccagtttcatttccccatgttcctccagggggcgctgtttcctattctagctcctgctaaagccaggttccctttctgtaaactcacttggggaaactcaccaaggtactctccgaagctacaatcatgacagttacaaaacaccgctgttcggagattaggcctaggacatacgtggtcagatttttctctgttgaagagcaggtagagaatgggaaaacaagtgtacagaaatcaccaaaaatctcagagctgcgggaacagaaattttgtctgttttattaaatcataagttcaaaaacaatgcaaagcttccctccctagaagataattcctagtaaaaggctgctaaaacccacagggttttgttggtggtggtggtggtggtgttagtgatttgtttgaaatctggaacgccttgctttggtctttgtatggtttcaccatgattttacccatcctggagcctgccccagcaatacttgggacaagtcacactaactatgtatgtcttcctctgaaaggaatggtgacctgtggtgggcccagagcagccgttccagttacaaaggggtatcttcacctgcagtgaagaaagcaactctcagccacaggggtgttagccgaccttggcctgaatagaggctcctcagggctttggagggagttttagaaaaagaggcctctcagtgcctggcagagttgtgctcatcagcttcaacaaaacccatctaactaaatgcagggagcatttgtgagcaatttttctattcaatgattgctcaaagttgcagattattctccagatgatgttcttgcttgataagaacccagcaaacagtaaaatcaagatattcagaaaaagctttatatgtgtgtgtacgtgtatatacataccatataactcaggttggtttcagtaagcctacagctatagcttccgttcttggcaaagatatataaagtgtattctttgcttttatgtaatgcagcagggtttttcttcctttaaaagccttctgctccacacattgactgctttcttgcttcccatgttatcgtgtacacacttcactgacaaccttcagcctgtatcacctgagatatgtttctcctgcacaaagacacagcatcctgctgattctgtctttgtggtattaatggcagatggctttaaaaatgcttgtgggggtcaggtgcagtggctcacacctgtaatcccagcactttgggatgcagaggtgggatgctgaggtggatcacttgaggtcaggagttcaagaccagcttggccagcatggcgaaaccctgtctctactaaaaatactaaaaattagctggacatggtggcaggcacctgtaatcccagctacttgggaggctgaggcaggagaatcgcttgagcccaggaggcggaggttgcaatgagccaagatcgcaccactgcactccagcctgggtgacaattacttgtgggaatctgcatgtgaacgtacctggctgggaacaccctggcagatacagtcatttaatgccaggaataaagggcaggaaggtgtatagtgagagaatctgagaaatgggcaccaggtgtggaaagagctgtaatgtgaagtagaaatgggtaggcttgctttatgtctttaatttctttcttttttttttcttttttgagacagagtctcgctctgtctcccaggctggagtgcagtggcgcaatcctgcctcactgcaacctccgcctcccgggttcaagcaattctcctgcctcagcctacctggtagctaggactgcaggcgcacaccaccatgcccagctaatttttgtatttttagtagagacagggtttcaccatgttggacagggtggtctccatctcttgaccttgtgatccacccacctcggcctcccaaagtgtgggactacagacatgaaccaccatgcccagcctatgtctaatttctttttagcctgcttcctgctttttttttttttttgccacatgattctggagaatgccaaccgatatctacgagatctgtgaaactgagttatacatataagaactactttgtgaagaagatttaccaggacacatgcaaaggatttggtgcgagaaatttccattgtaatgctgtacatgctcaggttcagggacttctaagagggaaaaaaaggccacagagctgttgtccaatcaatagcctcattaccactcaaccaataactccattaacactaatgatggcttgtttccactcctggcaacaaggtctgtacttgtagaatgactaatggccacttcatacagaaatccacgccatctcctgttcaatgtgcatctgtgtcccaggcaggtgggatgttgttcatagtttatttttatacgctttgaatcatgtaaatctgggcctgatggtgaaaacttgtctgccaagggccagtatgtaacgacagtgatcgtgatgttaattgtggtggcccgtgttcatagcaccatcccacagggactcctcatccatcatttggctttaatgttcagccagtcctgctcatttgggaatcagcatgtcttcttgatgtaatggtaggtaagtttgattgtgaaaatgaggaacgggcgtgctcagtgcttgccgaggggctggcaccgagtctactaggtagaacaggggtttctacacctaaaacatgtcattgcggttcttttgctgtcttggcatatgattaattacttcacctttgtgtgttccttagtacttttcagtagacacaataatgccagctaccatcctgggatataatgctataaaaactaactatagttccttgaatgtttgtgtttaggaggtgatacaggctaaaaatgtgcttaagatcaagaagatcttagatgctatagtaaataataaagtatagaatttaatgatgagagtagaatattttggttttacacagcactttgaggttgataaatggacactaccaggctctctttcagaaggatacactgcatagagcatcatccctgtcatcatcaccatcaaataacacccctttgtagggcttaataatatatgatctgcaaagagctaataatctagtgataggaactctctggcccttaagaatgtacattctaaaatcaactaatcatttagtatatcctcttggtaaatgagaaaaatgtaaatttaagcaaacataattgtggagaagttggacctcttgtaggaagtcatttcaggatgctcttctcatttagttgagaatctcgatgtgttgggtgagcaaagagctgatttcactgaggacgccaagagcactgaatgtgccacataagagagggagaaacagaaagaggtaggctttaagggggtaaggtgaaaccagttgacaactgtgctgccagataagcagtaataatattacttttatttctattgtttaagtaacattggtataagtacctattttaccaatttaagaaagttagttcactatttcagtgttagaacaacatgtagtttataactaaaagcaccttgaaattagtatagatataaagattagatcaaaggggctggctgagcacacccacctacctctccttccctttgctttcattatttctttgcaactttcttcttgcccacctacccaggcaacaagtcctcctccttcccctaaaacactggggacaggagacagcaaacaagaacagcagctaccaacaagcgaacagggaatctcagacctaataatgagtgatgcgcaatcaagaaacatcagacacttgggggcaaagcagcacagtgaagcagaaagaacattccctagcaatagcagaagaatgtctttctgtgaaatttagatttgcaaaatctgaacaccttggaattgttgcaggtgaacatcatgccgtggccagggtagatgggccccgaacagaaataacacttctcaacaagcatgttgaacccgtatgggtccccactgaccaaaggccaaacttgagaggaagtgaccgaatacctttctagtaaagcaaattaatagcaatgctgttagtgccaggaaaagaaaaagggtcatcaattgaaggcaaattttaggtaatccctgcgaaacagaaaacagacagaatatgattaatgaagacaatgatagcctcaaacccagaaagggctgtggcagcaaaagagtggccactactctgggaatgttccaagttcggggacattggacacagggagcagcagggaacctgggaaacctgaaaagcgattgggtcgagaacgacattcagagttcccagttaggtctggccctttgccaagcttgtgccaagtaggtaacagcagaggtgtttgccctcagctcaaagtaatgagtggatgtgccccagggctggagattccacatagctcaaggggaacagggaggctgggcgcggtggctcacgcctctaatcccagcactttgggaggccaaggtgggtggatcatttgaggtcaggagcttgagaccagtctgaccaacatggtgaaactccacccctactaaaaatacaaaaattagctgaatgtggtggcacatgcctgtactcccagctacttgcgaggctgaggcaggagactcacttgaacccgggaggcggaggttgcagtgagccaagattgcaccactgcactctagcctggggaacagagcgagattctgtctcaaaaaaaaaagaaaagaaaagaaaaaaagaggaacagggagcctcggactcaggagatgagctgctacacaccttcctcccaaagagacatgcctcctccttcccctcaaacactggaggcagggcactgcaaagagacagcagttaatgacatgggagcagggaacctcaaacctcacaaccaaggagcatgagacacttgaggggaaacagcaccgtaaacaggggcagcaaggcccacaaggaacctacaggaggaaggaacctacaggaggaagcatcataaacagagcagacagaataggacaattacaagaagtatcactaaccatagttttcaaccaattttttaaattaatttatttattttttattatactttaagttctagggtacatgtgcacaacatgcaggtttgttacatatgtatacatgtgccatgttggtgtgctgcacccattaactcatcatttatattaggtatatctcctaatgctatccctccccctcctcccaccccacaacaggccccggtgtgtgatgttccccaccctgtgtccaagtgttctcattgattttgaaccagtttttgaaaaccagaaagatgaaattctcttgtccttcttttgtctcatttgagcacaggattatactgggctcctaatgagctggagctggttagcatcacctgcctgtccccccaccccttttttttctgtgccctggaacagtttgcataagctatgagttatttgttccttggaggttttagaaaatacaccccaaaccaccatatgggccttgaacctttggcagacagaatacctcttcaaatgttatttcatttttttctatggttgttggtttgcataagctttctactccactttggaccaactttggaacttttataatcctgtgagttgcctatgtcatctaagcttgcaaattcaatgaagtaaagaaatattaatttctaattttaaaaaactcttttgtatctgtagttaagcctcctttcattgcttctgtttttcattactgtcttctttctggtttttgtcttaattatacttctaaatatttgtctatgatgttggtcttctcaaatgttggtcttatgatgttggtcttttgaattatttttatttttttgagacggagtctcacttcgtcactcagcctggaatgctgtagcataatttcggctcactgcaacctccacctcccgggttcaagcaattcccctgcttcagcctcctgagtagctgggactacaggtgcccgccaccatgcccggctaatttttgtatttttagtagagacagggtttcatcatgttggccaggctggtcttgaactcctgacctcatgtgatctgcccgccttggcctcccaaagtgttgggattacaggcattagccaccgcgcccagcgctttcgacttttattagtcaaatctactgttttattttattttctattattaatttttgttcattcctttatgattactttagtccactttctttaagtttattttcttgctttttttttctttttttttccctgagagaaattttaaaatttttaaaattttcttcaaggctctaatttttctctcagcacagtctttgagttgtaggtctttttgctgtctagtcctaaagaattttgactttgacattctttttagatgtatttttaaaaatacctttaacataaatatgtatagttgctagaaattcgtattttgtttgcttgttaagtccttttaatgattaccatatcactaaactgtggtagtgaattcagactgtagacaaaatttttaattttttgttgagcgttccttcgtggattagggaaatgtcaaattgtttgaaaagtgcttttgtgaaaataattttataatatctctattacagagatatatttcatatatcatacaatttatcaatttaaatggttttgagtataattggtatgtgcacctgtctacctagtcaattttagaacatttctatcaagccaaaaagaagcaccatactctttcactattatcctctgtttcttccccaccttttccctcaccgagaaatgactaatttactttctgtctctatagatttgcttattctggacattttatataaataagatcatataacgtgatattttatgtctggcttttatgactaagtgtaagtgttcaaagtgttcatccatgttgtagcatgtagcaatcaacatcaaatagaagtggtaagatacgacattccttccttgttcctgattttagggagacagcatccagtctttcaccataaagtatgatgttaattacgaactttttgtagatgccctttgtcagatggaggaagttccatagctagtttgtttagtgctttttatcataagatgctgtcagattttatcacatgatttctctgcatcaattgagataatcaatggttttctcctttcttctactaatttggcatattaatttaatggatgttccagtgtttaaaaaaacactgtgtgcctgcgaaaattcccccttggtgatgatatataatcctttttatacaactctggattcagtttttcaatattttgttgaggatttttatgtctatattcataagaaatagtggtctatcaatttctcatgatgtctttggttttggtatcacggaagcaattgcctcatagaatgagttgggaagtgttttccctttttctaaatgttttggaagagtttgttaataattggaattaattcttctttaaatgtttggttaaattcactagtgaatccatctggtcctgtggttatctttgtagagagttctttattactaattcaacctcttttctattggtctgttcagattgtctatttgttatcagtttttgtagtttatgagtttataatgaatttgtccatttcatctaaattatccatttattgacacacaaattatatttctttataatcttttctatttctgtgatgtccttttttatttctgagtctagtattttttgtcttccttcttttttttcttggcaattctagttaaagctttgacaactttgttcatactaacttcattccagtgagatataaaaatgtcactgctatagctctattcacttcctcactttctggggcattatttttatacataaactaatgttaaacatgtaacactacattttaataattattatttttataattttatgtattttaaaggagctgttatgggttgaattatgttcccccaaaagatatgtactaagcctcagaacctcagaatatgaccttatttggaaatgggcttattgtaaacatagttagttaagatgagataattttggagtagggtaggcccttaacccaatatgagtcgtgtctttacaagaagaggagtgagaaagacataaaaaggagaatgccatgtgaagacacagagacacacaaggagaagaaaagcacagggaaggcagactggagtgatgcatctacctggtaaggaatgtcaaagattgctgaacaccagaagctaagagagaagcatggaacagattgtcccccagaaacctgcaggaggactcaaccttgctaccaccttgatttcagacttgtagcctccagagctgtgagaggattagcttacattgtttcaagccacttagttttgtgataatttgttgtggcaaccccagaaaactaatacagaagttaaggaaggaaagaaaaaaagtaagtatatatgtgtagcttttgttatttcagtcttcttatttattatgtctggctctctttatttgcctggatttgagttgctagctggagtcattttctcagccaaatacactttttctctcatccacttgtgctgttattggcatatatttctatatattatagacccctcataacacatcatatacatatacacacatgtatataatttctaacttatgtatataatttatatcatatatacacacatatatagttttatacaattactttgtaaaacagttaagggaataaaagagaagaaatatgcatttatactgtatgttataattacatgattatgtttcctggtggtctgtgctttatcatggggattgaagttactgtctgggataatttgttttcagcctgaagaatttctttagtgttttctgtaaggcagctctgccaataacaaatactctccttttttgcttatctatgagatatttgcctgcattttcaaaaaaaaaaagctctatttgcctgcatttttgaaaaatagctttgctgaatatagggttttttgttgacagttttttttttttttttttttttgcttactttgagcactttgactatattatcctaatgccttctggctctcattgtttgtactgaagtcagtggataatcttataagagtttccttgtgagtttccttgaaggttcccactcagaagctggacgtcctgcttgagatattcttgaaagaatatctcaaatggaaaacttaatattttacagtgcttaaattgttatctatagagcagttaaggggaacgataatcttataacaggatctgcatgattcttggacagtgattgtttttttttttttctggctgctttcaagatgttctcactgtctttggctttcagcatttttatggtgatgtatctatttgtgaatatctttgcatttatcctatttgaggtccatcgagcttcctagttgtgtagattaatgatttttcatcaaatttgggga

SEQ ID NO: 12 - DNA, 45770 bp, Homo sapiens
  misc_feature (1)..(45770): CHST10 Poly SNP
  misc_feature (24707)..(24707): n is either g or a
  misc_feature (34078)..(34078): n is either g or a
  misc_feature (35799)..(35799): n is either c or g
  misc_feature (38709)..(38709): n is either t or c
  misc_feature (38947)..(38947): n is either g or t
  misc_feature (41180)..(41180): n is either a or g
tgaggcggtgccggcgttctggcccccaaagccggtctagcgcgccgggcgtcttccttacttccgctgccgccgccgccacatcccgggacccgacgggccgcggcgcggaggcctcggggcaaggtggggcgggcctcccgagctcccaggaccccgcgcgcttcgcccacaggcccggcgaagcccgacccgcgcggcgcccccagggccaggggaggagcctaaggacccggacgagcgccgctccagtagggtgagctcggggacgcgcaggcgggtgggtttcagcgcctgggcccctctccccgccgcggggcgcacggaaaaaccggggaacccgcgggttttgtcctggcgagccacatcccggtgtgttttggcgacttgaagacctccctagttcgcgggagtagcgggaagagccttcctcgcgttaattatgcaataagaaggcgtccttgtgcgggatgctgtgacccgcggaattattgatattgtgcgagcctacaatttacttctttcatccttggctgagaatttgcgtttgtaattgtagatggagagaggaagaaagggttcagcttgggtccaaggagcatgcagaggaaggcagggaagaaggagcatgtgcagcttcggtgcgaggggagtcaggggtgggaatgcacgttccctgcctgaggggccccggggtgccctgagcctctgatcttcgctgtcaggaggcctgtccgaagttggaggttgaggcatgcagttctgcacttctggctgggaaggtgaaccaggttttccaaaatgtcatttttgctttccaagtctgcaaggcaggaaagggttgggcagtgaatggaaagtagtgcagccaggttctggttagctcagcggcaggactgtcataacggtgggtttttgttgttgttgttgttgttgttgttttgtctgaaaaccagagtctggggctttgggccatgaggagttgggttattgcattgcttagagtgccagagtgagaaatgtctcagacgctgttaaaattaggcagctcagtttagctctggctctctgataaccaaccacctcctccttcactcttttcagtgactgggttaaaatgaaaagacacaaagagagaagtggtcttttcccttccctccccattataattaagagcttagtccatcttggctcagaattggaattcagaattcagaattgctcttgaccctgaagaatagaatctcaaagaaatacctgagcagaaaattctcttcttcgctgaaatgaaaattggagtgtttgcaaaactgaacaaagaaaggaaagaatttgtaaacatcacaggcaacttgcagttatattcggatcatttttcagtgtttgaggagttcatacaataaaaaggtgagagagagccaggaatagaaacaggggagagaggtggttgcaggaccttagagattgcagaaacccaggagttcattttcttttcatacacttctggataacctggatgtgaggaccatcaaatgccgtacatgatgtttctaacaatgatggaccacatatacaacagtggtcccataagactatactaccttatttttactctaccttttctaattttagatacacaaatacttaccattgtattacagatgcttacagtattcagtacagtaacagcagtacaagttagtagcccgggagcaatagatgattccatatagcctaggtgtgtggtcagctgtaccatatagcctaggtgtgtggttagctgtactatctaggtttatgtaagaacgctctgatgtttgcagaagaacatcgcctaacgatacatttctcagaaggtatccctattgttaagtgatgaatgactgtatataaagcttaatctttcaatcaacataataggaaattgcttttaattttagcattgagttcttagagtaaagggaggcagagagagaccgtgctgcatgtgtcccagtcagcttgggctttattgtatgttaaatgagttgtatgtttattttggtagatctcctaaatccatgatctaattccatgactttggcttgtttctggttttttatgatatggcatttggctaaaattttccaggtgctaaaggtgtaaggagtacgaaaatccagagaacattttgcattggaagaattgatcatcttgtataggaatcctataactatttcaaacatacgaaacaggcataattggatttgattatttttgctacaaaaaatgtttcatttttcacactaagttacatggaagagtcttttaaacagctagtggttttggtacatttagaatattcatttaccaagaaatccaaatataacctgcctttgtaagagacccattctgccaaatatatttgaatcatcaaaatggttcactatttccttcctaagtataaaccaagttgtattaagtaagttgatcttgtaacttttaataatgcttttttttttttaattttcctatccagtgacaagaggaaccaagaacctcagttcaggggaaacacagcaaggaaatgtgagccccaggctgcagaaggtacgtgaaggagaatgtgagctcatcagttatttgagcatgccattcagtattgttcctgccttttttcttgcctgtgcagattgtaaactcttgattaggagtatgtaaatgtgtgcttagaaacgtttccttaaatataataataggagcatgctctgaggctgggattatgtgagttagtacctgctgagacctgtgcttggtacagagtgaaccccatacaggtgtttactgtatattattattattgttcatgaaaacctgtcttaactacaggtgtatttctcactggacagttaagagtgttttcattctcctaactaagggtggttaatcgttccaaggcggtaaattgtaaggatgacaacagagaagacaaaggaaatttctgtacgcagattgagagaaacctttactatgaatttgaaagtctcagtgacatgcaatagaactttatagtataaattcatatgccacactttgcattatggagttgtaatttaatgattctattgatagggtaatgcattgtagttcagaatgtgctcagggttgatggtgaaatgtccccgtttctgcagccctggtctgtctagttctcatctcacctgtcatcctcctggggttaccagttccttgtacattaccaggtttttgtgtgtgtgtgtgtgtgtgaagtttcctttagagtctggctgtgttttaaaagttgagccctggacatgtgatccctggtatgtgtatgaggtgaggttgtcagtaaagggccattgacaggcctcctcatctgacccacccctgtccctgcttgcccactctgcatgaggaacactggccttcttgccacttttggaattctgggacccagaccacagtctttgcccaggggtctgcatggcttgctcccacaatctgtcctgccttttctcaacatcctgcccatgcccttgtttattagccactgcacctgtcacctggcttgatcatatacattgatcacttgatttgtttatggcccgtctatgtctgttagtaggaagcactgtgagagcagggaatgtgtgttgctatatccccagggcctagaacagccccggctcagaggagggctttggtaaatattgctgaatgaaaaaatgtctggaaaaagcctggttaagcagagttaagtgggcttatttaccatgggacttttcagaaactttagtaagtgaatgcgcatattaaaagtggggcctggcaggtgggaggcaaactcatcagcagagtaagaaaggcgctgtgcttctggatgacaactcagacatggggaaaagctgctggcgggaatggtattggcagctgagcaaaatgaatttacaagtttccttttcaaaatgcaggggaggaaggatttgcatcaagagatggtaatagtaacatttccattgttagttattacaaacatgtacaatgtgtgctatttatcttttatttaaggtggggaagggggaagattagggcttcttgtagattcttccttccctgaccctgctttccccataaggccttaagttcttcagctgccagttcatccttgtgggttgaactgaggaaccaaaccctctggcttggtttcagatcctgacatcttgacttgtgaaaatcccatttaatgactggaagtaggaaagctctgaagatggatatgcagattctaggggtcaggaggctctgttcagggcctgcgccatgaccgaagggagggcgtgtaggggctcaggttctgctcccaccattagctctagaggcactctgagagttgtcttggctccttgaacaaaggggagttaattacagaaaatgccaggctttttaaaggccatttgtcccctagctgtagggagagcagcagcccttggcagagccctgaggaaagactctttatgtcaggccgcagtcctcttgtagacagaaataatgagccttggtggtgtcatcctcagataggaggcaaaccccatggtgaaattctgtattcaaggaaacaatgcagagaatggggcggacttagaggagctggggtgaagtgaatttggaatgcctctcttttaaaaaaaaatggggcagagttttgtgttgttttccaaagtcagacaaagcctgattctacagagtctagttaaccgtagatgggagggctgtaaaggagagtaagatgaaggcagtgatggaaggtcttagattctaattaaacctcttttagctgtgtatttggaacacttgtaattcagagcatcaatagactctcgttgactagatgcttttttgctgccaattttccttcttaagatggaaggaggtggtgggagaatggcgtttatgccagaatgcctagagtctgcattttaacaagatccccagggggattcatgtaggcattaaaatttaagaaggggtgaggtcctggaccagcaattctcagtcccagctgctcattagagtcacgaacagagctcttaaaaaatgcctgggtactgcctccagagatttgtgttgtcttggctggggtattcttggggcccggggtatcactgtatttcttggaagtttcccaggtaccgccccagacataaagccagacaccttcaggtagatgtctagattcagaaggcacataatcccgaagcaaatgacaccatgcttagctgggcacaccactctttaggattcatcaaaacccaccacaccagataatgtggatcctcgtagctcatccgctggcttctagagccacagccagagatgatgggatgtggagcacccaaccggggttgcttgtgccgggttagaattctccctcctccatgaatgaaaatgaccttgagactgggcagtggctgagtgggcatttgctttttgtacctctgactctgctgctgaagaaactgtttcaaaatttaaatcagatcatgacatcaccacccctcttttcatgtaaaactctcttcaggggctcccattgcttgcaaagaaaagaccataatagccctggcaggccccatgttgtctggcctgcatctgcctcagcctgtgccccagaactccagccacatgggcctgcgtttagttactcaggggcccattcccttggcctggaaccctgcccttcaccttaggtaactgtgctgtcccagaccactctgcccaaggcacatcccattgtattttctccccacagcaccatgtccctctcacaccatcaagtaccactcctcagatagcttctttccttcgtgtgggcctgttagacgacaagctctgtaaggacaagaactgtgtgtgtttagttagggactcagggtcatatccttggcagctgttttactgcatgaatgaatacactggatactggataatgaataatgagcttgaagtcattatttttaggttattttgtccttaaacttgtatgcacatacacacctactcatgtttgagtgctgtattttgtaaactgtagagatattggacctgagggaagtgggtattttgagagagtactgggctgtagtcttactggttctgattggctcatgtaggatgtgacttgtagaacaagtcccagttttctaaatttttaactaggccgggtgtggtggctcacgcctataatcccagcactttgagagtccaaggcaggtggatcacttgaggtcaggagttcaagaccagcctggccaacatggtgaaaccccatctctactaaaaatataaaaattttccaggtgtggcgtgcctgtaatcacagccactcaggaggctgaggcaggagaatcgcttgaacccaggaggtgcaggatgcagtgagccaagattgcaccactgcactccagccggggtgacagagagacacactgcctcaaaaaaaaaaaaaaaaaagaaaaaatgcttattacaaatatttaaaatatgaattgtataaagtacaaaaagagctcttactgtcctctcatgattttattctatgtattacatatatgtgtctatgtttgtatatgtgtgtaatcatatatatttcacacatacatgatttttttaacaaatgggatcatacattccatcctgcaacttgtcttttttgtttactggtatatcttgacactttggatatggatctatgtcattggcttgcctttcatcatagagttttatttgaaatgaaaatgtttttggacttcggcatgatttcctaaaccccccaatcaatgtgttttaagtagtaagtgtatttgaatgcatatacatgctgtggcttagatcattttgttttcaaataatactgaagtcctcatagcatttggttgttttctagtctcagttaatggatattaaacatagaactgctctgtggagactagagaaatattttgaggttgaaagggggcctcattcttgaaaaagcctggagaccctcagggagagggttgggcaggctgcctcctgaagtacctttccacattcctgagttctagtaagttgctcaattgacacagtcattcagcaaatagcaattgttggctcatggtgcgccaggcactgtgctggtccctgctgtcctgaccagcatgagcccatattctgcaaggagagcaaatggcacatagcgagagcatctggactgtgctgggtgtagtggaggaagtggagcaaggtcaggtggcgcagagcggtgctgggggtgccacctgggtggtgatgaggcagagctgactcttcctctgctgcccatgggaaagggagcaggccctgcttaccccgagtgtacaagaagcccagtggccgggagcagctcctcagagagctccctcctggaccccgcagtgactgcccacaggctctgtggcctgcaaggggctctacagccagatatgggcatgctggcaggcagctgtgcttgaaatgctgataggggcctggggtgtaatgctcttctcaagagagtggttttggcagggctagggttttgcccctgaagctttgcaaatccacatcccccactggagtctccacgtgtcctggtaccatcccggggacaagaagcagggaaaaagcaggggaaggaggtgggaaccctgcagtccacccttctcctatcctaatggagtggccagggaagggactctctgtatatcttagtttagtaagagtttgcagaagtcaagttaaaaatggattttttgaaaatgaaatacccatgtgaaagaacacattggatgatacatggtcagttgcatgattgttgagaaggtcttctgactgatgagtgtgcaggtagctgtttgttcctgtggatgaaaaatgggagcccgaagagctcttcattgacacacccacagccacctagctagggagagggtgagtgtagaccagtccctgacctcctgcccgggtgaaagactagctacggagacggtgagtgcagaccagtccctgaccccagcccaggtgaaagactagctagggagagggtgagtgtagaccagcccctgaccccccgcccagctgaaagaagctaagagctcctgacttttaaatgaaaatccaatacttaggaaggcacatatggcttcaggagagtgcacctctcagttttcaactcatgtagttggagaaatcctatccctaggccacctggcttcctggagaacagaagaggtgctattcattttcaggtaaggcttcattatcttcccactttacctgcagatgagctcagtgggcgaaatcatattacattccttcagaagactagttccattggaaagatttgattcttaaactataaaaacctccaaagtgctgtcctgaggccgggcgagggtgatcaggggttggaagcctggagggaatgagcagagcaggcagtggaatatgcagttcccaggtcctcccgccacatgctctgcagagtcagcgcgtcacctgcaggagggaggcagtgcctcttatcgttgttccctttttcatagcactgatcctaggagagggtgggttgcaagccccaggacactcagagccaggacctgtctgtttagaattgcatgcaacctgcgtggtacatcctgttccttttactccctccccaacccaccctggtgcctctgctgcttggttagaaatggcctgcagctggcatttttcaggggggtgctctcactgtgacccatgaggatggacccccctgagtgcactgtcttagagggctgagctcagtggacttggtactgctgggccctgcatcctctggccacagtctaagcctcagtttcttgaagggaagttagcagttgctggaataagagtgtgtcttgtttttttctctcttcttggtgtagaccctactgtcgcattaatttctggcaaccacactgagaaaggtgtagattaagctggaaaatcacgaagagtgccaagggattggtcagtttttactgggggtctgcaccaggccaggtgggtgctggttttttgtctacattgtctcatttaatcctcatggccactctgaggtagtggtaggaggagggccttctattagagatgggacattgaggcttagagaggttaagtgacttatggagtcacagagctaatgggtgtgagcagggatttgaaccaagtctggggttctttgtgcctcactatctctgacatggagtggcggaaggaggaggggattgtgggatggagacaggagacaggacagctggcttgcaaggaatttggcatgcccctgctgggtggtgttgctgataaactacagtacactcggttaaatgtgaagttcagaaaacaacacataggtttttgtttttgtttttttttagtataagtatatgtaatatttgggacatactttatactaaaaaaattaactgaaattaaatctaactgggtatcctgtgtttttatttgttcaacccgacttggggaacctgggaaggacactgggcctcatatctgggcacaaaaaatactggttttgggggggagtataagtatgtcttatgcaatatttgggttatacttacactaaaattttatgttatctgaaattcaatcttaacttgggggatgtcctgtatttttatttgtctaatcaggcaaccctattggtgaccccaggaaacacacgaagccttatacacgggcacctgagggtggtttgcgagccatccggagaaaacccaggcagcttggcaggtggtgagctccccactgcaggctgtattcaggtgtggccggataactacgtggtgggtgtgtcatggatcctatttgcattccagatgcctggttcctgtgagattctaggatgtaaatgttgagacaaggagagtgattcacctgggtcttcatggagctctgacccacccagggttaggaggctctctctgaaattatttgccatcagcactgtgttgaggggaccacttctccctgccatgcagaagtgatggatggcctcagtcagtcggtggaagccagctcagcccagggtcttgtctgtacgtggagagctttggcttgaagaagcactgtgttaaaggtgaaatgaaacacactttcttgtgtcacctgccaagaactgacagtgacttcccagttctttatgtgcctcctgcaggagagtgtggcttctgtgccaggctgaggaccgacatgccccgtgttgctccctggctgtgacagcatgaaaaacacccacctcagtgttctacccaggccgctgctggcaagtgggcggaggcgagaagcgtcagtgttcattcctttgcttttttagagcttctctaggtgtggctacatcttgtcagccagtcagaattttaaacacagccagctcctaattgccccagcatggcttctgcccactatgaatgaccctcagctaaggcctagtccttggcaggcctcttcctgccacctgcttccagaccatcgtgggagctcactgggaccttagcctgggcccaacaggagtcagggatcaaatgtgcaaaggagtcttattctgtgttctgagaacacaaggaagtggtcttctctcattatcatgtctctccattagggtgttctaaatttgattttattattgaatcaatcatttatattattaattcaatatgaaatgttaaatgccaagtcaaactacctattgtagcagtggaaaaaaacggaaatatttgtgctgatacttactgactgaaatcacctgtcgttttcattcctctttgttgacttgatgtatttgtaagcagcaggggcatctcgcttgtgttttccaggaagagtcagtgaatggctgcggtgtgacaacatgcaccaccagtggcttctgctggccgcatgcttttgggtgattttcatgttcatggtggctagcaagttcatcacgttgacctttaaagacccagatggtacgtatgcttcatggtggaacgaattttggctaatttagacctagctgcaacactgttcctaggtacatgcatagatgacttctgtcacagagtcaaaggactttcatgccagcagggaccttggaggtcatggcctccgttccttcatgttacagaggtgtgaggggaggtagggtgggaggggctggagggtcttttcaagcatctcctctggaggaaggaagctgctctttgtggctgaggcctgggtggtgcctaggagcaaggagcagggtctcctcccagcagcacagtggccttatgccttgcagcagggcgcctctcaggctcgcagttgggaattctctttgcctcatgtcatcatgagaggtgcagcctcaactgcttggcatgcccgtgtggtggccacatgtttgaaggtcaccctccatgcagcggaggagggtcatttaaatgtatgtcttcaggttgtcttggaggctttcttagctctcctttactgaacgtaggcattcagatgaggacggataaagagcgccaaattgggtctcagaatgctgattctacttcgtgctcttgtcatttgcttatctacatcacaatgtttcttccaccaaatggacaccctgcctgctccggcaccgcccatgattgccctgagcatggtgaggtgctctgtggtctgtggagtgctggatatgtccaaagaggtgtgtgatatgctctccagccccgaggccacttcattgagtggccaagcaggcaagcacgaggaagccagacacatggagtcattgaagtcctcatttgtgccgtggattggcccattcctttaggctgattgggagatactggggaacgtggatgagcacagcactttgctgtgctctgcaccgtactttgtcctcctgccgatggtggccttggaaaggggcagttagagatgcctctgtgccagcagttcttcctggaggctgcactgacctgtgctgtctgtgtgggacaggcccctgctccacctcacagagctcccaggcatgtccctggctgtgtcaaggactgcccgatgtcctacacctcctgccccatcctctctctgccccaccttgtctgcagagggacagcaaggttagaagggaggtctgcagggaaaagagggacaccctgaaattagcccacatggtggttctccccatgacagttgttgggccctgattggctgtcatcacatgtcctgcctcatcctccaggagccctggagagaaacctgtgaggtctgcacagcctcgggaggtgatattacacctgcaggtatctgggcaggtgtcactgagcatgacagctcacgcccgggactcggggttccgtcagcagagcaagggtcgattcttggagggttgctggaatgtgacacgatgatctcagtttgacagtttggacatttccatggcagcttcagcacagtgccatgccactgagagatccctcctgaagccctagagccgggttctcatccccgcagcacttcagaatcacctgtgggactttacagacctgctgctgcttgagacccagtgaaggagaatcactaggggtggggcccagttgagaagcacagtggtagatcctagctggagaactgaagagaaacagagctgctgagaataagaaataggtgttactcaggattctcctaaatgtcacctcctggtatggaaggcactcaaaaggcaggtcatgaggttaaattgtttatggtttattttgcttaaaaaagtaggagtagatgtaatacattttagtgagacttctataggtaatagttaaataagacttgtgcctttgtgttttactgttatctggcagaatggcctctaaagaatgccttgtttcccagcggcatctggtaaatgaggtctcattctcctttgatgtatcaagttttgtgctgaatgttttcagtgtagacactgatcctggaagctaagcaggggtaggcccggttagaaaaaaagcaagtgtaggcgcagaacagggttttgtgaagcggagaaaaggagtggtaaggagtgttaggagataaaacctatgaagaaagatgaagggctttcggattttacacctggagaggagcaccgcagcggtccttaatactgcctgtgagatctttccagccggctgccttcaggcgagtgaaagggggcactttccctgccctgtgagatctggtgtggtgtgtgggtgctgggtcactgagatgggagtgctgcccctgaccccgaggcaggggctgctggtggtgaggatgctgttggccgcacagtgtgcagtgaactcagtgagaatcttctgttgtgggcccactcccgttgcggggtgaccaccacagcactacccagcctgcctcactcgcgtgagatgttacctaattgtcccaagggacctggttaggttaggatcctgaaggtggatatccgccagctgagttctggatgcaggatgcgagctggcacccagcatcttgccagtgcacaaggacgctgggctgaagcatcaagagcatttacactcagagcctgcccctgcaggcgtcagagaggccctgggctggggtggtgtaggcctctcccctggagcctgcccttccagcactgtgctttagagagtgtgtcccggagcctggatcttgggcagcacaggaacccctctaagctcgtggccataaagggcttctcacatgttggagtttatttcacacacgttcacggtgtttttgattatgaaccagaagcccattgtgaagtgtcaagaccaggaaataacagacacggcagtgtccacggtggggagttccatttcctggaaagtgcgtggagaagccttggcctcagtgctcccgggctgctcctttcagctctgtcctctgggacagggccagcctcagaacccccatcagtggtgtgcatgttcttctcacctacctgcctttcccggtttctcctgccactggagcccctaggaagagcatggttgtcgtgagttgctgtttaaagcaacacttactttttttagtgttacagtttctgttcagctcagcagtggagccagtgatatttgtggcaatgatttatcctcagttagcaaatttcagtatcatattgaactaggatcaggtgttgtaactagactttctcataagaaaataaatccccctcagcgaagggaatgtgatggaatcatatggcaagactcaaaatgatgcccttgtggacctggtttgtgtttgtaggcgctggtttttcctctcctggttgacttcctcattggttctgagccgcttgagggcagagcctgtgatgtgaaggtctctgcagccttgaccatctttgcatgtacttatttgccatctgcggatactctccagtgaaatgtctgggtgtatcgtacctattttctaattagattggttggttttttaattgttgagtttgaggattctttatatattttagataggagtccttggtcagataagtggttcataaatattttttccctatctggagcttgtcttttcctcctcttcaaatgggctttcacagtgtagattttctctttggttgttttttaaaaagattgatggttttatgtttcacattcaggtctgtgatccactttgagttcattgttgaataaggggtgaggtttggatcaaggtttgttccgtgtgtgaatgtccaggtgccccagcaccatttgttggacagactgccctcctccgctgaatggcttttatggctttgtcaaaaggcatttgggcatctttgagagcttctatttctggggcctctgttctgtcccatccacctgtgtgccttttccttttagagaagacattcaacctctctgtcttccagtgtacagtgccaaacaggagtttctgttcctgacaaccatgccggaagtgaggaagttgccagaagagaagcacattcctgaggaactgaaggtgggcacagccaggccgtggtccttgtcctcttgaacacggcacccttgtcgcggggagctggccttcccctgtggctggttccgcttgtcatcacgtctgcgttagagccttttcctgtgttacttctccatgttagttcaccttgttaatttccatttgggagaggcacaggtcacgtctatttttgtgcccctcacagagctctgtgcatcagggctgctctgtcactgttggttgtgcagcattcctgaccagctgaacatgagccttgcctggggagccgagagtattgggcagggtcaggaggaaaccagaagtgggagaagacatctcacccagtcatggggttttagagtgaaagggggccctggacagcagaacaactaattcagcctccaaattgtatggatgagagaactgagcctagaaaaaaggtggatcctccacagtcccatggagttcctggcggagcccaaggctgctgacttccacccagcccttgctggcttgacattctggctccatggctctctgcaggcttcttgtgcacctaaattcctgatcattccctagctgggatgaggggtgcactctggaaggcctctcacttcgtaacccccattctggatctagagggttgaagttgcaattgttccagaaggaatgaaatgggtacagcgagccctaaaaatatttttagcccagaatcaagccgtagaggttgggacagctcctatccatgggtcacagtgtaaggatgataaattagaactcaataaacatagaaaacatacaccagtcagtagagtgctgctggaggttacttctcgtaggacattgatggaatggaggccaagtttacagaactctgagacagcctaaatgttgcttttaggttgaggcatcccagggtaagaaaataatttggatggggtacagaaacgaaaccaaaaaatcttatgggaaataggagagtggctttaataggatggatttaataggaaatcaaagttacatggataaaaacaaaggtagggtaagcctttggcaaagtgtcgcaacaaggttccctcaaggatgccataccctgtgaggaagagggtggtcatcttggtgctccctctccgggtggagggtgctcccggagagattgccagcctgcaggagtcattgcaaataaaaagactgcgcctgaatgtgctttacagtttgcagtgtactttactgggtttcaatctcattggtcttccgagccgccctctgaggtatatttttattctgtttgcatttgggaaacatgaggctcaaggaactgtgctcactgggtcagtatcccctggacagcaagttgtgggcctgggctttgaactcagtgtcctctgtgcccctctcttacccgctgccccagtcattctcatgagactcagatgggaggtgagggaagtgggggatgtcagaggtgatgtccgctgaggccacatgccgttaggtgacaccaaaactcagcatgtgtcttctcacaagaaaggggatttatcaacatgatcagattctgtagctcacctttaaaagtttattttggccaggtgcggtgcctcactcctgttatcccagcactttgggaggccgaggcgggcagatcacctgaggtcaggagttcaagaccagcctggctaacatggtgaaaccccatttctactaaaaaatacaaaaaaatagccaggtgtggtggcatgtgcctgtaatcccagctactcgggaggctgaggcaggagaatctcttgaacccaggaagcggaggttgcagtgagctgagatcgtgccattgcactccagcttgggcaacaagagcgaaactcggtctcagaaaaaaagtttactttgtgcatggtgtagccgaatgtttgaatggaaaatagaaaataatatttgtctttaagttggctttgtatatttccaaagggaaaaaagaaaacaatgctcattcttacacacaattgaacaagaaatcttttttctttagctgggcatggtggcttacgcctataatcccagcactttgggaggctaaggcaggagaatcgattgcgcctaggagtttgagaccagcctgggcaatatactgagacctcatctctacacaaaatacaaaaatcaggtggttatggtggtgtgtgtttataaccccagctacttgggaggctgaggtgggagaatcacttgagcccaggagttggaggctatagtgagtcatgattgtgccactgcactccagcctgggtgacagaacaagacctcgtctcttagaagaagaatttttgtctctaatgctttgctaaaagaaaagcaatatctaatatcttttctttgttcaaagaaaagcagtatctaaaagtgcagagttttctgcattttctaaagggaacttgttgggaggtgctctctcctgatgcgctgttcttgagtgccatccatgatcagggttaggtttggaacagagagggaggagaagacagagaggctcttttgggataagtgagcaagaggtgggatggatgaggaaatgaggttaaacgagacccgttcttgtaagagcaaggagagtgcctggcgtggctcctggttttccatggtgggtggagggcccgggcagccgctgatgccctgtggggaggaacggaggccactctgcaaaggggcctctcgcttccccagtgtcttcatctcgaaaagcaggcagtcagtagcccccaggatgctcttcccaccaccagggaatcccaggaaattcacttaaacacacaagggagaaagcatcctggccagaggtcatgagtgtaagagagtttggttacagtagatccataaaggaagagctgggtggggggccctgaggggggacctctgtcatcctgatagttccagcgtcccggttctagtgtgttctagaagtcttatgtccttcccattttctaactgacgttgtcccctgggaggacaggttgttaaaactaccctataaatggatttcctggcaagcccagtgcattttaaaagatataacaaggatatttgggtccattcaatacaattatttggaaggatcatctgctttgaaattttgggaagttctgtgtagctttaagagatagatatggccgggcgtggtggcttacgcctgtaatcccagcactttgggaggccgaggtggcggatcacaaggtcaggagatcaagaccatcctggctaacacagtgaaaccccgtctctactaaaaatacaacaaaaaattagccaggcatggtggtgggcacctatagtcccagctactcgagaggctgaggcaggagaatggcgggaacccgggaggcggagcttgcagtgagctgagatcgtgccactgcactccagcctgggccacagaacgagactccgtctcataaaaaaaaaaaaaaaaagagagagagagagatgtagcagctgaagccttaaaaatgctgagaaacagggccacaactagagggggccgatggggttggtggaggctgccctgctattcaggaatgccctcaggatgcctccagagaacaaggaggtgtgagcagcaaggggactttaactcaccgaggacagggggcctctgagcaacttctgtgtgtactggcacatctccctgtgccccctccaacccatgcacacacaaggcctctcacattacaggtattctcttaggttctaaaacagccctgaaaagaatggaccagcatgtagaatttgagctttttcatctttttccccctagctagaggattccaaacttcttactttggtttttaatttcttttttcccccaagacggagtcttgcttgctctgtcgcccaggctggagtgcagtagtgcgatcttaggctcactgcaacctccacctcctgggttcaggtgattctcctgcctgagcctcctaagtagctgggattacaggtgtgcaccaccacacccagctaatttttgtatttttagtagagatggggttttactatcttggccaggctgatctcgaactcctgaccttgggatctgcccaccttggcctcccaaagtgctgggattacagacatgagccactgtgcccggccttattttgttttttaaagtcaaacttctctccaaagatctgaggaaccaagcttgcattcattttccttgcccagcctgccgatcgggctggtggagaggctctgaaggcctcatgaaggggctggggatagtgggtgtcactctgtagacagacaaggaagggaagaagagaaggctccagatggaaaggaggggatagaccagcaggagcggctctgcttggcccggtcctgcctcctttaatggtccctgggcctcttctgctctgtgtcacctgcagccaactgggaaggagcttccagacagccagctcgttcagcccctggtctacatggagcgcctggaactcatcagaaacgtctgcagggatgatgccctgaagaatctctcgcacactcctgtctccaagtttgtcctggaccgaatatttgtctgtgacaagcacaagattcttttctgccagactcccaaagtgggcaacacccagtggaagaaagtgctgattgttctaaatggtgtgtgtgggtctactgaatgtccactgggaagggtcttggtggccggtgctgaggaggctggggaggacagcaaggaggagtcacaagagggctggtttgacctgaagggactggtggccgtccagacaggcctgtttttgttgtttcctgttagtgttgtgccttacaagttagtggggctcgtttagacaccgattcttttcaaaggggcacagccacagtccagctctcctcacctgtcacagcagatcctcactttaggtggctcgcccacccccaggcccccctcctttgtctcttcaggttccctgtgctgatggttatagtcacccactctgtccgacatccccagggccccacactcgcagagccaccaggaagcctcacggtcaccctctctgcagtgagaagggctcacactgtagagcctgggaggggagccctggcccggggcctggagcctctttacctgcagaccaagcgttctgtgccagcgagcaggaagaaattgtaccccatttcacactaagcatctgtgttcagaggattgagtcagcttgcttcaggaaacctgatgtttgctagggaacaaattagatcatcacaaagtaacctcatacactgcagttttgattactcactactctttttagagatgtctatttatttaaattccaattagtctgaaccgatcctaataattatgggctctgcttatgaaatttagcttcagacaggagttagttccagtcaacagcagtgggactcctgggtcagaaatcggattttggggcaccatgggtaggtggccctaaggctccatgtcctgcttgccactcctgatgctgcccacagagtcggtggtcactcctggccactgtttggccttcgcaggggttggctgggagagagaatggtggcacctcatcatctggttgtcacatataattaatgtgcttctgcagtgattggatagcatgttgggttttcagaagcagaatgaggctgcaaatcgaattgaaaacaaggaatatacaaaggctcacaaatcagccaccacagtgtgaagcagcatactttaagaagtaaacacccacttagaagggcagcatagaaatcagagtgggcttgctggatcatgtaatacagaagcgggtggtccttgtggctatcttcggtaaccactagtgcacctggatggggacaggtgcatgaatgggcccatatgtggacccacagagctggttctgtcattgtccccttgagagcagtgctccccacgcctagtttacagccatccatagcatgtaccgcagagttctggactgggctttaaacactcgggggaggaatcaataaaacagacaagactgtgtccactggtcagatggcccagggagattcttccctgccaggactccaatcttaaccctaccggattaacacaaagatggatattaaggcttacagaaacttggagaaaacctcagcatactgacagtgtatttccatttgtctgtattgagaaaagagtgaaaaacctgctcagccaccaaccctaggatggtctctgcccaagttccattcagcagcctggacctgcactggtccctgatgacagaccctggctgttggcacggccctgccttctcgacataccttgtcctcttttgactcctgtctcaaatgtatcacagctcccatagcttagtcagatttttccagcatcaaaaggtctttgctctttgccagcctgggatgctgctggggtacctgagagccactgtgggccaggggcatgtggtgcttggagagcttagcctgtctatgggatggggctgtgaagctgctgcgggcatctgttagcatgacgttccaaagtcctgcttctctggcattttcccccagtctcagagtagagtaagtgttgctggtgttaggagttctgtttgcatgcagcgatcttcctctaatggcagatttagcccagttaggtccattgccaggggtaggcactgccagcatttccactcctgctccctccccctcctccctgaaatcatcagtttcctctagttggcttatggattcccagaagcttttcttcactcgttcatcctgctggcagaagcagttgaaattcaaagacctaaacttggatattgggggtgggcttgtcatgcacacgtggggaacatgaggcccaaggtaaagatgaggtaaggacatgcccttctctaaggggcgtactggagcagccaacctgccttcctttccgtttacttcccaggagcattttcttccattgaggagatccccgaaaacgtggtgcacgaccacgagaagaacggccttcctcggctctcttccttcagtgatgcagaaattcagaagcggtgagaacagcttcctcaaaggggaggggggagtttttgtaaacctgagaagaaatttggggaaaaccccaggctgagttctgtacttggcagattgatcggaggaccacagagggctgtcggtttgcatcagtgagaggcagctaagctacaccccccattcggcgcctcaaaactctcagttccttctgagaatttccagccttaccttcacacagtccattaacatgaaggtgacatcattttgttaatagaaattagcaggcaactttgttctgctttggtaaagttttatagattgcttgctgaatatgatcttttctttataagaaagggatttggattgcagagatctcactgagtatttgattctcccagaggcattgtgcccactgctgtgggagctgcccctgcagtggttgtgtgggctgcatccagcatgggcagggtagagagacggaacccctgatcgcagcaaggacggagtccaggctgggcgcagtggctcatgcctgtaataccagcactttgggaggccgaggtgggcggatcatttgaagtcaggagttcaagacaagtgtgactgacagaaaccccgtttctactaaaaaaaaaaaaatagcccgctgtggtggcacacacgtgtagtcctagctactcaggaggctgaagcaggagaatcgcttgaaccctggaggcaagggttgcagtgagccaagatctggccaccgtactctagctggggcgacagagcaagactctgtctcaaaaaaaaaaaaaaagaagatggagtccttagctaatagatgagaaagttctcatgtagtagctctcaggtggcccaggagagcaaggctgaaaaggagtgaggatgcaaaagcagcggctcacgtcaggtcaccagctggattttgcctcctgggtctgcagccacctgccttgcatggcgcctgacctgcatggcacctgcccatccttacaacccttaccagagatgctcctggtgaggagtgtcctgctgttgccctgagcactcatggggcttttgtgagactcagtgagtgaagacacggcaaagcacagagagcagtttctggcctgtcgtaatcacaccgtgttctgtgatgtcactgttgtcatcgtctttgtcatcgtcactgctgccggccctcctccccagggccatgctctgctgccgcccgcttgcagctcacccagacctgctcctgccctctggagcgtgaagcctgactctctgttttctcttgccccccttcccctggcaatttgaattgaacttttaaaaatatgcccttaaagtaactttccctggcaccatctattcctgactcagagttcctgcccttatgattttctgcccaggaacaaaatttgtaaacattcttgaagttttgaatcattcaagtaaaacagaaggtagattaaatagatgtcttcacagtgactgcctacaatgagtactgtggccttggacaggtaaggttttccaagcctctgttttctcacctgcaaagtgtggtaataacaggattaatccacaggatcttggagtagattaagagacgtgtggaatgcattcatggcagcctcggcacgtgagggtcccatacacagtgctgcactccgctcattcttccctctcccgccccctcagctgtgacctcctgtggcatcaagttaacctcttgttcgtttttttccttagattgaaaacatacttcaagttttttattgtaagagatcccttcgaaagacttatttctgcatttaaggataaatttgttcacaatccccggtttgagccttggtacaggcatgagattgctcctggcatcatcagaaaatacaggaggaaccggacagagacccgggggatccagtttgaagatttcgtgcgctacctcggcgatccgaaccacagatggctagaccttcagtttggggaccacatcattcactgggtgacgtatgtagagctctgtgctccctgtgagataatgtacagtgtgattggacaccacgagaccctggaggacgatgccccatacatcttaaaagaggctggcattgaccacctggtgtcatacccgactatccctccgggcattaccgtgtataacagaaccaaggtggagcactatttcctgggcatcagcaaacgagacatccgacgcctgtatgcccgtttcgaaggggactttaagctctttgggtaccagaaaccagactttttgctaaactaatgcataagacctatgaattcaaatatctttattagacctggggctaaccaggtgaagatctgagcccagaaatgacccttcctccaccacacccctcctttgaggacgcccggggtctcccacaggcctgtgagttgcctcggcatatgacgcagaaccccaactgttacaacttagtttggatgtaagatgctctgaggaccctgcccacacccctgcgtgcattaggatgtcgctggcctttgctcacctcagaggggagaaaaggctaaagatttgcagtttgacagcccagcagggaggaagcatcacacagcgttangagccgtttccttcaggtgttaaggaaggggatgcccctgaggttctcctggctagtcagggtggcttcacccatcactggtgggttgcaggaacagcacccaggactctgaggagggacagagaagcaagggggctgctgaaatcgcagagacttttgcagcatcagatctgaggagtaaaacggcacctctggccttcatcttggtgctgcgacaattgtggaggcaaagcattctttctgtgactattttgttcctgtagacagtcagcgatggccagagggtggtgtggtgtccaggggtccatctttccagaatccatgcctgtgtaatgctggtccatgcttctgaacctgtgtctgccaagcgcctatttcattcagcacaagacatacgattttagaaggtgaggggaggggaggctttttctacctgagaaggggagtgtctttgagggccttaaaaggaccatggcccaggaatgggggcgctggttgggcttggagctcaggctgctgtggatcccggcgcatcagttctgacttgccttacctgggtggacagcagtgaatctccacctgtcttctccagggagctcccatgttggggctgaagacgagcaggggcaacctgccagcatcacagaattcagtgtagtttatacatttcgattcctttcatctcagcaaaatgggcactgccagagccatttctgatcacaccaccatcctggaccatgtgactggaaggtgggtaaccaagttcaccagcaataaaacccagcgcccaggtagcctccagcagtgcggcttcctggcaacaaggtaggccctggtgcagggcaagccgcagcgaccatttcagataccgtccacagccaggaccgctgagaactgggacagtttcctgggatgagtgccagcctgagcctgcatggtgccgccgagcccggggtggaggagggagccaggcttcgcttcaaggcggcctctaccttttctcagaatggtttcctgattgtgtcaatgtgaaagttaaataaaatttatgtgccaaacctgacatgagctgcggttctgggaagggtgcctgtggccacgcgcgccccaggcaggtggggtaggcatgtgcgcacgcatgcatagctgctcagggtaagcagaccgcaggaggcccagccttcagccgccatggacacgcagggccgaggacgccacactgggttatttttctgtaacgtttagcaaagtcttgttacaatttcagaccaaatgagctgattgattacctctttgctgtttggaatctaactgtggatctgtatatgaatggaaggccttaaagctagtcttaattaaaatagtgttttccctcagaaacaaaattctggcccctggggtggtctcttcctcccctttggcatttgggtcattttcctaacatattttgccacacaagtggagattgctaccatagtatctcctggacatctcactgtgtccacagcaaggatgccgccaagcacggcagcccaccccgttcatttctgcacagccagtacccccactcccctgtcccctgacttccttctgaggctccagatccactaactccctcctcagcttacagcaggtggtgcacctccttctgccccctgaggcaccaccatgtggagggctctgctaccctgtctgggcgttcctcaggactgggctggatggtggcacagctcattcccaggcagtgacaccagggtgggggtggctggagtaggcaggcctagggggacctctgcactaacagcctgggtttgagagaaacaaacagcgaccctgcctccaagaagtgctagggcccggagggcagttcctaaattaggaagtttaataatacgaggttgacttaatgggtttgtgttttagaccgcttctctcctactggatttcactcctagcgcgtgtcaggtttattggtcttgtgttgagaaccactacagagaaatgcccagagctgagatgagatttgattttcacagtggctgactgggtgcacacgaaggtgtgcactcacggcctgcagggcacccaggtggcctctgccctgggttcctgaaaagaagagcctctgacacagcactggggggggtcctccctttcaccccccagctttctcgctctaaaccccggcatgctttgctcatctggaatctccagaagcagggaacagaaagggaaaaatcaagacagcagctaaatgtgaggcgaaggcagcctattggactaaactcaaattatgcagcatagtttcccaagctcctcggacatgccgagaccctcagcaggatagtgcagttacagggctgagcagaaccgcaggctcataggagatgagaggcctgggaagtgccaggacaaggctgcacctatccagcttgagtcaggaggcttcaggcaggtgaggtagccacacttggggagcattacagaagggttggccagaggagaggatgcccagggggatggaagctgcatccaaggtatggcgggtcggctgtgaaaaatgtgggcgcccagacaggaaggctgggcagcatcacatagggcttccaggggtgtgctcttcccctccgggaggaggggcaaacacaaggcaaccaacagctgtgatgattggggtgatagggggttgtccccaaagctgagggaggagcatgcaccagtacagactcacacccctacagcaagtagttggtgcctggaggggaagggcaggtagcttgatgtgaccaggaatggctgtgctctgcaagtttgggtgtcatttgggtaataggggctctggaggatttattttttctttttattatataaatttaaaaatatatgttggctgggtgcaatggctcactcctgaatcccagcactttgggaggccaaggcgggcagatcacctgaggttgggaattcaagaccatcctgaccaacatggaaaaaccctctctctactaaaaatacaaaattagctgggcttggtggcacatgcctgcaatcccagctacttaggagtctgagggaggagaattgcttgaacccgggaggcggaggttgcaataagccaagatctcgccattgcacttcagcctgggcaacaagagtgaaactcattctcaaaaatacatgtgtgtgtcaaagtgatcactgaactccaagtagctctcagcttcaaccgtttgtttttttgttatgtttgttttgtttttggagacggagtctcactctgtcgcccaggctggagtgcagtggtgcgatctcggctcaatacaacctctgccttctgggttcaaacaattctcgtgcctcacccccctgagtagctgggattacaggcatgtgccactatgcctggctaatttttatatttttagtagagacagggtttcgccatgttggtcaggctggtctagaactcctgagctcaggtgatccatctgcctcagcctcccaaagttctgggattgtagccatgagccaccacaccgggccccacagtttttgtataacaaattccctttctcatttcatctgccccttgccccactcacttaccgtgacttgtatggtgcacacacctgagaagctcagactggggatttgagtcccagtactttgacaccagagcccacagcattgactgccagctacattctactgactcaaatccattttttttaaccctgctgttctttggttcattgcccttcattcatctgaccaccccaccaaggcccccaacccagtgcctcccagcagcagctccccttggcttctcagcttgctctccccattcaccatggtgtctatttcaacattgtccatttttctcaaacttccactccattctcatttactgtgggcagatgaccttgtccccgacagagggaacaggtgccatcagatgagcattctccaacatactggctccacacctgcaaacttcctgtatccacacatcctctcccccttctactacagtgggcggggcttgcctcccaccttgctctgcacctccccacatctgttccgaattaccctcctgctctagtgccagctcctgtatctgcaccccttctccccactgggctctttcccggtggcattcaagcacgttcagggctctcgaatcctaagaccatcctgccttagctctttccccatcccacatggggccctgccttacctgtcacccccactccatcttgaatctagcagttttcagggcagtcagtcaattttccagattcttttcttctgtgcatcctttaatttctattgcttcccagtattcttagctcagttcttttctgtcaccactctctctgggcaaggaggcctccctgcagatcttcagttaccatctgtgtggaaataagccccatggggacccaagaacttttgtgtgttttgtccgctgtggtagcacaactctctaaaaacagtgcttggcacaaagttctcaagacttttcgaatgctgatttagacccaagtttgtgccttctgtctgcatgtctttttgagcttctgacacttataccacctgcctactaggtatttcctcctggttgccccacactcatttcaaacttattaattcctgagcagaaccttcatcttccccttcaaacctgttggtttatatgtggccatgatttcagggaacagtgacacaaaccatccaggtgtctgaaccagaaatctgagtcagaatcttggacaactccttcttattcactcctcacatccaatcagtcaccacttccagtagattcaactatttacaggtttcgggttcccggccacttctttccatcccttttgccacctctccagtatgggccactagacgtcccaggcgggccacacccacaaacacagatgcctgccctgctgctccccctgcctctgcctctgattttggccacctgcaatcatttctttcttttttttttttttttttctgagacagagttttggtcttgttgcccaggctggagtgcaatggcgcgatctcagctcactgcaacctccgcctcccaggttcaagtgattctcctgcctcagctgcctgagtagctgggattacaggcatgcgccaccacaccaccacacccggataattttgtgtttttagtagagatggggtttctccatgttggtcaggctggtcttgtactcccaacctcaggtgatccgcctgcctcggcctccgaaagtgctgggattacaggcatgaatcagcatgcctggccccacctgcaatcatttctataccccacagctagagtgggttttgtcaaataaaactctaattgtgttgctccttagctgaaactgttaaatggctccccattgctcttagaaaaaaagtccattttcttccacataaagtacaaggtctttaaggatttagactctggttcctctgcagtctcatctctcaccatctccttcactttcactccatgcccaacccataggctttggctgtagccatctattctcatctccatgagtttgccatggcctcttgtcatctccagaccttgtcacaggctgttccttgcaccccttctcttcaggtagctaactgctattcatcccttaatatccagctcagaaagcatttaggaactcttaagcccaagatgcccttccttgagatacaattcatcctggggcaaaattcctgtccatctgtgaacctatgaccagataagttacgtgcttccaaaatacaatggtgcaacaggcacagacatcctcatgccaaaagggagcaatcagaggaaagaaagggatgatgggtcccaagcagttccaaaacatagtaaagcaaatcacattagggtttatggcttaagattaatcttttttggtttgatgctctgccctccagacccactggagcagtggtctcaccttccagaaccactggggtggcaaagtcactcccatgacttggcctgttgccccacctcctatgttgcccatgctggtctcaaactcctgggctcaagcaaacctcccacctcagcctctcaaagtgctgggattacaggcatgagccaccgcgcctggcctctgctgtcgttagtgtcagctggcagtgtttctgttggtatcatcccatttctgttcctggccatctctgttgagatggctggttaggtccatgctccacacccacactaatctccttatcaaatggtaggtcagccatacccttgttctcttctgaacatgttttcttattttttgcaacatagactgagaatctcaaaatcttttggctctggttcctttttgcttaataattcagtcttcaagtcatttctctcttcttgcattttactacaaccaatcaggagaaaccaaactgcttcttcaacactacttagaaattgcttcagctaagtacttaatgtcatcacttgcaggttgtaccttccacaaaacactggaacgtcaacataagtcaggcaaatcctttgctgctgtataacaaagataacactttctgcattgtgcgatgtcattttcctcacttctgtctgcgacctcactagaatgacctttaccttccatatttctaccaacattctgttcataattatgtatatattctctaagaagatggatgctttctgtacagctctcctcttttctatttttttttttttttttttttttttgcaaaggagtcttactcagttgcccaggtggagtgcaatgacgcgagctcggctcactgcaacctctgcctcctgggttcaagcaattctccggcctcaacctcttgagtagctgggattacaggtgcccaccaccatgcctggctaatttttgtatttttagtagagacagggtttcaccatgttggccaggctggtctcgacctcctgacctcaggtgatccacctgcctcggcctcccaaagtgttgggattacaggcgtaagccaccatgcccagcctctcttttccatctgagtcctcatcagaatcacatttcatgtccatattgttagcatgcatctgaaacttctccattatctgtacatcatccgtttccaaagctgattccacattatttgttacagcagcacccacttcttggtagtaatttcttagtctacttggattgccgcaataaaatactatagactgagtggcttaaaggacagaaatttatttctcacagttctggaggctgagaagcccaagatcatggggttggcagattcagttcctggcaagggctctctttctggcttgcagtcagctaccttctcaccatgtcctcatgtggcagagaaagtgctctgatctccctcctcttataaggatactaatctgatcatgggttcctatcctcatgacctcatctaaacctaattacctctccatggccttaccttcaactaccattgcactgaggattagagtttcaacataggaattctggggcgcacaagcattcaggctataacactatgtgatcgtcagggcagggaatatttacatttgccatagcagcacccaagcctgaaaacaataggtgcttcatgaatgttgaattgacttgttatgttcatgcggatatggcattttctatctggacattcactgacctccttggctacccatatattgtataccttggcatggatgcagcaaccactgaatcttcctccccccttcccctgctgccaggattcaactagggaataagatattaactgaaactccttctaccctcaccctattccaaaaccctatcatgaacagctctcacccgcccttcctgtcccataatttgaggatggggatgaggaaaaataaaagatcattcccacagaaaagtggttgccaatttctaaatgtgtattttctttttctgggccatctcttgccttctcccttagaaaagtgccagatgtaaaacaacaataggaatttgcactttcattaatctcaaagtaacttaagtgtaagatatactttagagatctttgcacataatatcaaagctgtctatgaacattgagcagctcaactcatgtcaggccccactgctttggaaataaaagacatgggaatctcatctcgagccagccaagttggccgtgctccaccttaagacctggaggcccagtgagttcctccaggcccagaggttctaaaggaagaggtagctatgcctgcaagctaagccggaatggaatgggctgagcataaccagaaagaagaaagtatggccacctgtctccacactggtcctggtaataaaatttgtctacatgtagaggttagaaatggtgctttgtggctggatgagaatgcgctttaataagcattcattcaaggacttcatagaaaacccactgagaacccaggtgctaaggaaggaaaagagaattccttttaccttcctcctagatcccttatgcaagaaatagacttggagcatctggcttccaggccctttggttctacactaatacatttactccattttgtaaattcagaactagtacccatgaccctacacgaataagtgaatgggctctgggccttgcgtttttcagaaagtgaattgccctcaaaccctcagttttcaccaagatgttgataaggaatgacaggttaaagtatttgctcagtactcaagtttgaaagtaaaaactagcgtaggacagaatgtaccaagttaaccaccagggaagtggatcctgtcctgttatccaggaccaggttttattaaatgattcatagaatcagatccatttattccaagtagactggaaatactcgtgtcctgatcctttttgtatggttgaaaccacttcattagacatgttgcaatagtaaaaagcccgattagcttagtgtttactcattttatttctcagttatttaatattttgttttccttaatatccatgatgtttgtctctggtgttctgatgtaaaatcatagtgtgtattttttacactaatgttgaaatctgaaatatatgcacccatctttaattttgcgtgatgtgttttacgtgctattcctttctcagtgacagaaatgaacagaccagaatttgtgggatttgggtacaggatctccataagctgagaatgcccctcttgctgttgctgccagactttcggaggctctgtggctgagccccagactccttactgtttggacactgacgtgggctctggcctctgcattttccagaaccccagagagacctggaaagtcatcctcagcctccattcctggtcacagatgataatgtagaactggccttanctgtctttcctgggctctggctttctgccaccttggactttgctactttctgtaggacttagtagcacctgccatactctgccactccctcccctctaggctgagccctgtctcacagactctgaacaatacgaggcttttgctgcccaaagtttgtcatgattgatttaaactagcatgccaaaaataaattcctaaaagtcagtaagtcaacttaataactgtgaagttcagttatcaaaaacttatattatttttagggacaaaatcttaataacctggaaagatagatttttttaaaattagtttttgttcttcagcttaactgacacgtaatttacaaaacataaattttaccttttataagtatgcagttctatgttttagtaaatgtacttttgcgactattactacaatctagttttagaacacatttgttacccaaaaaatctcctaaatacccatttgaggtccagctttaggcccaggcaaccactcttcttcctcctgtttctgtttttgcctttattagaaatttcacataaatgaattaatatgatgtataaattcttgagtatggcttttttcccttagtatagtcttttagatccatccgtattgctgcatgtatcaatatttagttcatagactgggcgcggtggatcacacctgtaatcccagcactttgggaggccaaggtgggtggatcattgaggtcaggagttcaagaccagcctggccaacatgatgaaaccccgtctctactaaaaatacaaaaattagccaggcatggtggcaggcacctgtaatcccagctacttgggaggctgaggcaggataattgtctgaacccaggaggcagaggttgtggtaagccaacatcacaccactgcacttcagcctaggtaacagagtgagatcctgtctcaaaaaaaaaaaaaaaaagaaaaaaaaaaagaaattagttcatttttactgctgtgggaattccattatatggagataccaattttatctattcaccatttgatgaacatttgggttgtttcccaggtttggctcttatgaataatgctgctatgaacacttgcatacaagacttggtgtaggtatatgtttccacttccatgggatacctaggcatggaattgccggtaataaatatgtttttttctaatgaaaagaaaatcaatgttatggcttttccaaagggcaaaactaggctgaacttccatgttacagagagaataaaactaaagaattagccataggcaaattgcactgataaattatctgaaaactaaaaggttaattataaaaataacagcaacatattttctagtctacagttgatccttaaatattagtaattatggccgggtgtggtggttcacgcctgtaatcccagcactttgggaagccgaggcaggtggataacctgaggtcaggagttcgcgaccagcctggccaacatggcgaaaccccatcgctactaaaaataaaataacataaaaattagccgggcatggtggcatgtgcctgtaatctcagctacttgggaggctgaggcaggagaatcacttgaacccaggaggcggaggttgcagtgagcggagattgcaccactgcacaccagcctgggcgacagaacgagactccgtctcaaagaaaaaaatatatatgtacatattagacaattatgatcaaaagctgtagacttntagaccagagtctagaagggtgtggccatgcttgccctgggcagccccatgacagctgatgtggaaagcgggaagaggctgacaatccttctccccagcatgtctgcatgaagccttgtgattcactttcaccaagtacctgatgtttcacaattccagcattcccgttaatgttacctcccattgatcctaaaaagaggcaaatatgaagatgtatataattttggataaatcaaaggtggttcctgaggaggaaagtgtccagaacctctgatctgcatagtattttacacacttccaagcataagaagatgaacagaatggcagaagtgagagtacccattttacagtgaggggcatcaaagaacaggaagtgcaacaaatgagggaggttcttgggctaccattcaaagctatccacttggaagtttctctgccagtttcatttccccatgttcctccagggggcgctgtttcctattctagctcctgctaaagccaggttccctttctgtaaactcacttggggaaactcaccaaggtactctccgaagctacaatcatgacagttacaaaacaccgctgttcggagattaggcctaggacatacgtggtcagatttttctctgttgaagagcaggtagagaatgggaaaacaagtgtacagaaatcaccaaaaatctcagagctgcgggaacagaaattttgtctgttttattaaatcataagttcaaaaacaatgcaaagcttccctccctagaagataattcctagtaaaaggctgctaaaacccacagggttttgttggtggtggtggtggtggtgttagtgatttgtttgaaatctggaacgccttgctttggtctttgtatggtttcaccatgattttacccatcctggagcctgccccagcaatacttgggacaagtcacactaactatgtatgtcttcctctgaaaggaatggtgacctgtggtgggcccagagcagccgttccagttacaaaggggtatcttcacctgcagtgaagaaagcaactctcagccacaggggtgttagccgaccttggcctgaatagaggctcctcagggctttggagggagttttagaaaaagaggcctctcagtgcctggcagagttgtgctcatcagcttcaacaaaacccatctaactaaatgcagggagcatttgtgagcaatttttctattcaatgattgctcaaagttgcagattattctccagatgatgttcttgcttgataagaacccagcaaacagtaaaatcaagatattcagaaaaagctttatatgtgtgtgtacgtgtatatacataccatataactcaggttggtttcagtaagcctacagctatagcttccgttcttggcaaagatatataaagtgtattctttgcttttatgtaatgcagcagggtttttcttcctttaaaagccttctgctccacacattgactgctttcttgcttcccatgttatcgtgtacacacttcactgacaaccttcagcctgtatcacctgagatatgtttctcctgcacaaagacacagcatcctgctgattctgtctttgtggtattaatggcagatggctttaaaaatgcttgtgggggtcaggtgcagtggctcacacctgtaatcccagcactttgggatgcagaggtgggatgctgaggtggatcacttgaggtcaggagttcaagaccagcttggccagcatggcgaaaccctgtctctactaaaaatactaaaaattagctggacatggtggcaggcacctgtaatcccagctacttgggaggctgaggcaggagaatcgcttgagcccaggaggcggaggttgcaatgagccaagatcgcaccactgcactccagcctgggtgacaattacttgtgggaatctgcatgtgaacgtacctggctgggaacaccctggcagatacagtcatttaatgccaggaataaagggcaggaaggtgtatagtgagagaatctgagaaatgggcaccaggtgtggaaagagctgtaatgtgaagtagaaatgggtaggcttgctttatgtctttaatttctttcttttttttttcttttttgagacagagtctcgctctgtctcccaggctggagtgcagtggcgcaatcctgcctcactgcaacctccgcctcccgggttcaagcaattctcctgcctcagcctacctggtagctaggactgcaggcgcacaccaccatgcccagctaatttttgtatttttagtagagacagggtttcaccatgttggacagggtggtctccatctcttgaccttgtgatccacccacctcggcctcccaaagtgtgggactacagacatgaaccaccatgcccagcctatgtctaatttctttttagcctgcttcctgctttttttttttttttgccacatgattctggagaatgccaaccgatatctacgagatctgtgaaactgagttatacatataagaactactttgtgaagaagatttaccaggacacatgcaaaggatttggtgcgagaaatttccattgtaatgctgtacatgctcaggttcagggacttctaagagggaaaaaaaggccacagagctgttgtccaatcaatagcctcattaccactcaaccaataactccattaacactaatgatggcttgtttccactcctggcaacaaggtctgtacttgtagaatgactaatggccacttcatacagaaatccacgccatctcctgttcaatgtgcatctgtgtcccaggcaggtgggatgttgttcatagtttatttttatacgctttgaatcatgtaaatctgggcctgatggtgaaaacttgtctgccaagggccagtatgtaacgacagtgatcgtgatgttaantgtggtggcccgtgttcatagcaccatcccacagggactcctcatccatcatttggctttaatgttcagccagtcctgctcatttgggaatcagcatgtcttcttgatgtaatggtaggtaagtttgattgtgaaaatgaggaacgggcgtgctcagtgcttgccgaggggctggcaccgagtctactaggtagaacaggggtttctacacctaaaacatgtcattgcggttcttttnctgtcttggcatatgattaattacttcacctttgtgtgttccttagtacttttcagtagacacaataatgccagctaccatcctgggatataatgctataaaaactaactatagttccttgaatgtttgtgtttaggaggtgatacaggctaaaaatgtgcttaagatcaagaagatcttagatgctatagtaaataataaagtatagaatttaatgatgagagtagaatattttggttttacacagcactttgaggttgataaatggacactaccaggctctctttcagaaggatacactgcatagagcatcatccctgtcatcatcaccatcaaataacacccctttgtagggcttaataatatatgatctgcaaagagctaataatctagtgataggaactctctggcccttaagaatgtacattctaaaatcaactaatcatttagtatatcctcttggtaaatgagaaaaatgtaaatttaagcaaacataattgtggagaagttggacctcttgtaggaagtcatttcaggatgctcttctcatttagttgagaatctcgatgtgttgggtgagcaaagagctgatttcactgaggacgccaagagcactgaatgtgccacataagagagggagaaacagaaagaggtaggctttaagggggtaaggtgaaaccagttgacaactgtgctgccagataagcagtaataatattacttttatttctattgtttaagtaacattggtataagtacctattttaccaatttaagaaagttagttcactatttcagtgttagaacaacatgtagtttataactaaaagcaccttgaaattagtatagatataaagattagatcaaaggggctggctgagcacacccacctacctctccttccctttgctttcattatttctttgcaactttcttcttgcccacctacccaggcaacaagtcctcctccttcccctaaaacactggggacaggagacagcaaacaagaacagcagctaccaacaagcgaacagggaatctcagacctaataatgagtgatgcgcaatcaagaaacatcagacacttgggggcaaagcagcacagtgaagcagaaagaacattccctagcaatagcagaagaatgtctttctgtgaaatttagatttgcaaaatctgaacaccttggaattgttgcaggtgaacatcatgccgtggccagggtagatgggccccgaacagaaataacacttctcaacaagcatgttgaacccgtatgggtccccactgaccaaaggccaaacttgagaggaagtgaccgaatacctttctagtaaagcaaattaatagcaatgctgttagtgccaggaaaagaaaaagggtcatcaattgaaggcaaattttaggtaatccctgcgaaacagaaaacagacagaatatgattaatgaagacaatgatagcctcaaacccagaaagggctgtggcagcaaaagagtggccactactctgggaatgttccaagttcggggacattggacacagggagcagcagggaacctgggaaacctgaaaagcgattgggtcgagaacgacattcagagttcccagttaggtctggccctttgccaagcttgtgccaagtaggtaacagcagaggtgtttgccctcagctcaaagtaatgagtggatgtgccccagggctggagattccacatagctcaaggggaacagggaggctgggcgcggtggctcacgcctctaatcccagcactttgggaggccaaggtgggtggatcatttgaggtcaggagcttgagaccagtctgaccaacatggtgaaactccacccctactaaaaatacaaaaattagctgaatgtggtggcacatgcctgtactcccagctacttgcgaggctgaggcaggagactcacttgaacccgggaggcggaggttgcagtgagccaagattgcaccactgcactctagcctggggaacagagcgagattctgtctcaaaaaaaaaagaaaagaaaagaaaaaaagaggaacagggagcctcggactcaggagatgagctgctacacaccttcctcccaaagagacatgcctcctccttcccctcaaacactggaggcagggcactgcaaagagacagcagttaatgacatgggagcagggaacctcaaacctcacaaccaaggagcatgagacacttgaggggaaacagcaccntaaacaggggcagcaaggcccacaaggaacctacaggaggaaggaacctacaggaggaagcatcataaacagagcagacagaataggacaattacaagaagtatcactaaccatagttttcaaccaattttttaaattaatttatttattttttattatactttaagttctagggtacatgtgcacaacatgcaggtttgttacatatgtatacatgtgccatgttggtgtgctgcacccattaactcatcatttatattaggtatatctcctaatgctatccctccccctcctcccaccccacaacaggccccggtgtgtgatgttccccaccctgtgtccaagtgttctcattgattttgaaccagtttttgaaaaccagaaagatgaaattctcttgtccttcttttgtctcatttgagcacaggattatactgggctcctaatgagctggagctggttagcatcacctgcctgtccccccaccccttttttttctgtgccctggaacagtttgcataagctatgagttatttgttccttggaggttttagaaaatacaccccaaaccaccatatgggccttgaacctttggcagacagaatacctcttcaaatgttatttcatttttttctatggttgttggtttgcataagctttctactccactttggaccaactttggaacttttataatcctgtgagttgcctatgtcatctaagcttgcaaattcaatgaagtaaagaaatattaatttctaattttaaaaaactcttttgtatctgtagttaagcctcctttcattgcttctgtttttcattactgtcttctttctggtttttgtcttaattatacttctaaatatttgtctatgatgttggtcttctcaaatgttggtcttatgatgttggtcttttgaattatttttatttttttgagacggagtctcacttcgtcactcagcctggaatgctgtagcataatttcggctcactgcaacctccacctcccgggttcaagcaattcccctgcttcagcctcctgagtagctgggactacaggtgcccgccaccatgcccggctaatttttgtatttttagtagagacagggtttcatcatgttggccaggctggtcttgaactcctgacctcatgtgatctgcccgccttggcctcccaaagtgttgggattacaggcattagccaccgcgcccagcgctttcgacttttattagtcaaatctactgttttattttattttctattattaatttttgttcattcctttatgattactttagtccactttctttaagtttattttcttgctttttttttctttttttttccctgagagaaattttaaaatttttaaaattttcttcaaggctctaatttttctctcagcacagtctttgagttgtaggtctttttgctgtctagtcctaaagaattttgactttgacattctttttagatgtatttttaaaaatacctttaacataaatatgtatagttgctagaaattcgtattttgtttgcttgttaagtccttttaatgattaccatatcactaaactgtggtagtgaattcagactgtagacaaaatttttaattttttgttgagcgttccttcgtggattagggaaatgtcaaattgtttgaaaagtgcttttgtgaaaataattttataatatctctattacagagatatatttcatatatcatacaatttatcaatttaaatggttttgagtataattggtatgtgcacctgtctacctagtcaattttagaacatttctatcaagccaaaaagaagcaccatactctttcactattatcctctgtttcttccccaccttttccctcaccgagaaatgactaatttactttctgtctctatagatttgcttattctggacattttatataaataagatcatataacgtgatattttatgtctggcttttatgactaagtgtaagtgttcaaagtgttcatccatgttgtagcatgtagcaatcaacatcaaatagaagtggtaagatacgacattccttccttgttcctgattttagggagacagcatccagtctttcaccataaagtatgatgttaattacgaactttttgtagatgccctttgtcagatggaggaagttccatagctagtttgtttagtgctttttatcataagatgctgtcagattttatcacatgatttctctgcatcaattgagataatcaatggttttctcctttcttctactaatttggcatattaatttaatggatgttccagtgtttaaaaaaacactgtgtgcctgcgaaaattcccccttggtgatgatatataatcctttttatacaactctggattcagtttttcaatattttgttgaggatttttatgtctatattcataagaaatagtggtctatcaatttctcatgatgtctttggttttggtatcacggaagcaattgcctcatagaatgagttgggaagtgttttccctttttctaaatgttttggaagagtttgttaataattggaattaattcttctttaaatgtttggttaaattcactagtgaatccatctggtcctgtggttatctttgtagagagttctttattactaattcaacctcttttctattggtctgttcagattgtctatttgttatcagtttttgtagtttatgagtttataatgaatttgtccatttcatctaaattatccatttattgacacacaaattatatttctttataatcttttctatttctgtgatgtccttttttatttctgagtctagtattttttgtcttccttcttttttttcttggcaattctagttaaagctttgacaactttgttcatactaacttcattccagtgagatataaaaatgtcactgctatagctctattcacttcctcactttctggggcattatttttatacataaactaatgttaaacatgtaacactacattttaataattattatttttataattttatgtattttaaaggagctgttatgggttgaattatgttcccccaaaagatatgtactaagcctcagaacctcagaatatgaccttatttggaaatgggcttattgtaaacatagttagttaagatgagataattttggagtagggtaggcccttaacccaatatgagtcgtgtctttacaagaagaggagtgagaaagacataaaaaggagaatgccatgtgaagacacagagacacacaaggagaagaaaagcacagggaaggcagactggagtgatgcatctacctggtaaggaatgtcaaagattgctgaacaccagaagctaagagagaagcatggaacagattgtcccccagaaacctgcaggaggactcaaccttgctaccaccttgatttcagacttgtagcctccagagctgtgagaggattagcttacattgtttcaagccacttagttttgtgataatttgttgtggcaaccccagaaaactaatacagaagttaaggaaggaaagaaaaaaagtaagtatatatgtgtagcttttgttatttcagtcttcttatttattatgtctggctctctttatttgcctggatttgagttgctagctggagtcattttctcagccaaatacactttttctctcatccacttgtgctgttattggcatatatttctatatattatagacccctcataacacatcatatacatatacacacatgtatataatttctaacttatgtatataatttatatcatatatacacacatatatagttttatacaattactttgtaaaacagttaagggaataaaagagaagaaatatgcatttatactgtatgttataattacatgattatgtttcctggtggtctgtgctttatcatggggattgaagttactgtctgggataatttgttttcagcctgaagaatttctttagtgttttctgtaaggcagctctgccaataacaaatactctccttttttgcttatctatgagatatttgcctgcattttcaaaaaaaaaaagctctatttgcctgcatttttgaaaaatagctttgctgaatatagggttttttgttgacagttttttttttttttttttttttgcttactttgagcactttgactatattatcctaatgccttctggctctcattgtttgtactgaagtcagtggataatcttataagagtttccttgtgagtttccttgaaggttcccactcagaagctggacgtcctgcttgagatattcttgaaagaatatctcaaatggaaaacttaatattttacagtgcttaaattgttatctatagagcagttaaggggaacgataatcttataacaggatctgcatgattcttggacagtgattgtttttttttttttctggctgctttcaagatgttctcactgtctttggctttcagcatttttatggtgatgtatctatttgtgaatatctttgcatttatcctatttgaggtccatcgagcttcctagttgtgtagattaatgatttttcatcaaatttgggga

SEQ ID NO: 13 - DNA, 19 bp, Artificial Sequence
  Synthetic - Human GRINL1A (rs11853270) forward primer
tctgggcacactcccagct

SEQ ID NO: 14 - DNA, 20 bp, Artificial Sequence
  Synthetic - Human GRINL1A (rs11853270) reverse primer
actcaggacccaaacccagg

SEQ ID NO: 15 - DNA, 24 bp, Artificial Sequence
  Synthetic - Human GRINL1A (rs11853270) reference probe
ccgagtgcgccatctctttcttca

SEQ ID NO: 16 - DNA, 23 bp, Artificial Sequence
  Synthetic - Human GRINL1A (rs11853270) variant probe
ccgagtgcgccatctccttcttc

SEQ ID NO: 17 - DNA, 20 bp, Artificial Sequence
  Synthetic - Human HSD11B1 forward primer
gccacaaagagaagcaaggc

SEQ ID NO: 18 - DNA, 25 bp, Artificial Sequence
  Synthetic - Human HSD11B1 reverse primer
tcagaatgaatgggataattatggg

SEQ ID NO: 19 - DNA, 30 bp, Artificial Sequence
  Synthetic - Human HSD11B1 reference probe
cacattccttgacccagaattttacttcca

SEQ ID NO: 20 - DNA, 32 bp, Artificial Sequence
  Synthetic - Human HSD11B1 variant probe
cacattccttgactcagaattttacttccagg

SEQ ID NO: 21 - DNA, 22 bp, Artificial Sequence
  Synthetic - Human CHST10 (rs1370627) forward primer
catccccttccttaacacctga

SEQ ID NO: 22 - DNA, 16 bp, Artificial Sequence
  Synthetic - Human CHST10 (rs1370627) reverse primer
tgacagcccagaggga

SEQ ID NO: 23 - DNA, 14 bp, Artificial Sequence
  Synthetic - Human CHST10 (rs1370627) reference probe
acggctcctaacgc

SEQ ID NO: 24 - DNA, 14 bp, Artificial Sequence
  Synthetic - Human CHST10 (rs1370627) variant probe
acggctcttaacgc

SEQ ID NO: 25 - DNA, 20 bp, Artificial Sequence
  Synthetic - Human CHST10 (rs6716367) forward primer
agtccaaggtggcagaaagc

SEQ ID NO: 26 - DNA, 20 bp, Artificial Sequence
  Synthetic - Human CHST10 (rs6716367) reverse primer
ctcagcctccattcctggtc

SEQ ID NO: 27 - DNA, 24 bp, Artificial Sequence
  Synthetic - Human CHST10 (rs6716367) reference probe
ctggccttagctgtctttcctggg

SEQ ID NO: 28 - DNA, 25 bp, Artificial Sequence
  Synthetic - Human CHST10 (rs6716367) variant probe
ctggccttaactgtctttcctgggc

SEQ ID NO: 29 - DNA, 20 bp, Artificial Sequence
  Synthetic - Human CHST10 (rs7585898) forward primer
gcatggccacacccttctag

SEQ ID NO: 30 - DNA, 30 bp, Artificial Sequence
  Synthetic - Human CHST10 (rs7585898) reverse primer
gactccgtctcaaagaaaaaaatatatatg

SEQ ID NO: 31 - DNA, 16 bp, Artificial Sequence
  Synthetic - Human CHST10 (rs7585898) reference probe
ctctggtctagaagtc

SEQ ID NO: 32 - DNA, 17 bp, Artificial Sequence
  Synthetic - Human CHST10 (rs7585898) variant probe
ctggtctacaagtctac

SEQ ID NO: 33 - DNA, 20 bp, Artificial Sequence
  Synthetic - Human CHST10 (rs17024136) forward primer
agtccctgtgggatggtgct

SEQ ID NO: 34 - DNA, 20 bp, Artificial Sequence
  Synthetic - Human CHST10 (rs17024136) reverse primer
cttgtctgccaagggccagt

SEQ ID NO: 35 - DNA, 24 bp, Artificial Sequence
  Synthetic - Human CHST10 (rs17024136) reference probe
cgggccaccacaattaacatcacg

SEQ ID NO: 36 - DNA, 24 bp, Artificial Sequence
  Synthetic - Human CHST10 (rs17024136) variant probe
cgggccaccacagttaacatcacg

SEQ ID NO: 37 - DNA, 20 bp, Artificial Sequence
  Synthetic - Human CHST10 (rs17024129) forward primer
ccaggatggtagctggcatt

SEQ ID NO: 38 - DNA, 25 bp, Artificial Sequence
  Synthetic - Human CHST10 (rs17024129) reverse primer
caggggtttctacacctaaaacatg

SEQ ID NO: 39 - DNA, 23 bp, Artificial Sequence
  Synthetic - Human CHST10 (rs17024129) reference probe
tgccaagacagcaaaagaaccgc

SEQ ID NO: 40 - DNA, 24 bp, Artificial Sequence
  Synthetic - Human CHST10 (rs17024129) variant probe
tgccaagacagaaaaagaaccgca

SEQ ID NO: 41 - DNA, 23 bp, Artificial Sequence
  Synthetic - Human CHST10 (rs7574684) forward primer
tgatgcttcctcctgtaggttcc

SEQ ID NO: 42 - DNA, 20 bp, Artificial Sequence
  Synthetic - Human CHST10 (rs7574684) reverse primer
ggagcagggaacctcaaacc

SEQ ID NO: 43 - DNA, 25 bp, Artificial Sequence
  Synthetic - Human CHST10 (rs7574684) reference probe
cccctgtttatggtgctgtttcccc

SEQ ID NO: 44 - DNA, 24 bp, Artificial Sequence
  Synthetic - Human CHST10 (rs7574684) variant probe
cccctgtttacggtgctgtttccc

SEQ ID NO: 45 - DNA, 24 bp, Artificial Sequence
  Synthetic - Human M13 reverse sequencing primer
agcggataacaatttcacacagga

SEQ ID NO: 46 - DNA, 46 bp, Artificial Sequence
  Synthetic - Human GRINL1A (rs11853270) mutation primer
catggccgagtgcgccatctccttcttcaaagtctctcctcttagg

SEQ ID NO: 47 - DNA, 45 bp, Artificial Sequence
  Synthetic - Human HSD11B1 (rs17015076) mutation primer
gggatacacattccttgactcagaattttacttccaggaatcctg

SEQ ID NO: 48 - DNA, 46 bp, Artificial Sequence
  Synthetic - Human CHST10 (rs1370627) mutation primer
ggaagcatcacacagcgttaagagccgtttccttcaggtgttaagg

SEQ ID NO: 49 - DNA, 42 bp, Artificial Sequence
  Synthetic - Human CHST10 (rs6716367) mutation primer
gataatgtagaactggccttaactgtctttcctgggctctgg

SEQ ID NO: 50 - DNA, 40 bp, Artificial Sequence
  Synthetic - Human CHST10 (rs7585898) mutation primer
gatcaaaagctgtagacttgtagaccagagtctagaaggg

SEQ ID NO: 51 - DNA, 43 bp, Artificial Sequence
  Synthetic - Human CHST10 (rs17024136) mutation primer
gacagtgatcgtgatgttaactgtggtggcccgtgttcatagc

SEQ ID NO: 52 - DNA, 45 bp, Artificial Sequence
  Synthetic - Human CHST10 (rs17024129) mutation primer
catgtcattgcggttctttttctgtcttggcatatgattaattac

SEQ ID NO: 53 - DNA, 40 bp, Artificial Sequence
  Synthetic - Human CHST10 (rs7574684) mutation primer
cttgaggggaaacagcaccgtaaacaggggcagcaaggcc

SEQ ID NO: 54 - DNA, 24 bp, Artificial Sequence
  Synthetic - Human M13 forward sequencing primer
cgccagggttttcccagtcacgac

SEQ ID NO: 55 - DNA, 46 bp, Artificial Sequence
  Synthetic - Human GRINL1A (rs11853270) flanking primer
cctaagaggagagactttgaagaaggagatggcgcactcggccatg

SEQ ID NO: 56 - DNA, 45 bp, Artificial Sequence
  Synthetic - Human HSD11B1 (rs17015076) flanking primer
caggattcctggaagtaaaattctgagtcaaggaatgtgtatccc

SEQ ID NO: 57 - DNA, 46 bp, Artificial Sequence
  Synthetic - Human CHST10 (rs1370627) flanking primer
ccttaacacctgaaggaaacggctcttaacgctgtgtgatgcttcc

SEQ ID NO: 58 - DNA, 42 bp, Artificial Sequence
  Synthetic - Human CHST10 (rs6716367) flanking primer
ccagagcccaggaaagacagttaaggccagttctacattatc

SEQ ID NO: 59 - DNA, 40 bp, Artificial Sequence
  Synthetic - Human CHST10 (rs7585898) flanking primer
cccttctagactctggtctacaagtctacagcttttgatc

SEQ ID NO: 60 - DNA, 43 bp, Artificial Sequence
  Synthetic - Human CHST10 (rs17024136) flanking primer
gctatgaacacgggccaccacagttaacatcacgatcactgtc

SEQ ID NO: 61 - DNA, 45 bp, Artificial Sequence
  Synthetic - Human CHST10 (rs17024129) flanking primer
gtaattaatcatatgccaagacagaaaaagaaccgcaatgacatg

SEQ ID NO: 62 - DNA, 40 bp, Artificial Sequence
  Synthetic - Human CHST10 (rs7574684) flanking primer
ggccttgctgcccctgtttacggtgctgtttcccctcaag

SEQ ID NO: 63 - DNA, 67442 bp, Homo sapiens
  allele (1)..(67442): TEKT5 Reference Allele
actttcacctttcctggtgatgcctttggctccttgagctgagttttgcccgagtggggctcatgagggaggatggagtttcttgggactactcagaccgccagttactgtggtcccaagaaatgctgtggcttgacctcactgccagctgtacaggcgccagtgatccaggaatgctatcagccctactacctgcccgggtaccgctacctcaattcatggaggcctagcctcttctacaagatagccaacgtccagacctgcccggacgagagcaccagtaccctgcggccgcccaccatcctgcccacactgcgctccgcactcttctctcgctatagcccccacgactgggaccagtccaaccagctgcaggtgcgtggggccgaggcctcccggctgtgggccagccggctgacggatgactccatgaggctcttgcaggacaaggaccagctgacgcaccagatgcaggagggcacctgccggaacctgggccagaggctgtcggacattggcttctggaagtcagagctgagctatgagctggacaggcttctgactgagaaccagaacttggagacggtcaagaggcggctggagtgcgcggccaatgaggtgaactgcccattgcaggtgagtacaggggtggggacagggctgtggctgtgtcctggggatactgcacgctcattctgcttcccttgactgaagatgaaggtggcaggcaccttgcaggtcggtttgagctgcatcatcgaatacgatcagtaatacaatcttagtcaattcaggataatcccagtcaaatcagggtttcttggactgaatagaatttccttttctccttgaagctacatcaaagttgcaggggtttcatgaaaatattgtgtgcatacttatgcatgcctgagcatgtgtgtgttctggtccttaaagcacatgcttaaaataactgacttatttatttattttttacacagagtctccctctgtcacccaagctggagtgcagtggctcgatcttggctcgctgcgacttccgcctcctgggttcaagcgactctcgtgcctcagcctcctgaggagctgggattacaggtgcccgccaccatggccagctaatttttgtatttttagtgaagacagggttttgctatgttggccaggctggtctcgatctgatcttcccgccttgacctcctagagtgctgggattgcaggcatgggccactgtgcctggcccataactgccttatttttccccgtaatacttatcatttaacatgctctatacttgattgaatattagaatacagtatagtctccatcaaggtagagatttttgcctgctttgtcactgatgtattcaagactgctattcagtgcagggcacctgtatgtctgtgtgggtccgtagtgaccaatgtcggtgctgactggtattgtttacactaatgttttgaatgtattcccagcctaggacagggcgaagcacagagtaggcattcaataaatacatgctgaataaatgagtaaatatctaaatgtgactgggcacagtggcttacacctgtaatcccagcactttgtgaggccagggcaggtggatcacctgaggtcaggagtttgagaccagcctggtcaacatgatgaaaccccatttctactaaaaatacaaaattagctgggtatggtggcacatgtctgtaatcccagctacttgggaggctgaagcataagaatctcttgaacccaggaggcggaggttgcagtgagctgagattgcgccactgcactccagcctgtgccacaaagcaagactccatctcaaaaaacaaaacaaacaaacaaacaacaaacaaaaactaaatgtggacattcctaacacttccttggtctcctagcctccagttgtctccctgctcagttaggatagtttttagccgcatgtaacaaatactccacgatagtggtttagccaaacaggaatttatttttctgtcatgaggaaaattccagagggagacagatcaggcggctccagcctcaacttggtgccagaagggacccaggctcctctctctgttctgccacccacagcatgtggtttgtgttctcctgttcccaaggaggttttgcattttatactgcaagttcctgcatgccaggggcctcttgatattctcattcgaggcaggaaggcaagggtagaacaaagagcagaagcatcaatgggcaccattgctttttatcagggaatgtcttttctagaaggtccgtcgtgtgtctccatgtttagcctattagccagcactctcatggaccctggatgcaaaggggtctggataagtgaatgtttctcaccacgtccaggagaaaatcatggaaggggttgagtggacactgggtaaggaaccagcagcacctatgggaactgactttggccacagaggaagatgatcggctgctccctggagtgtgtggggaactcaggacctcttgcctggaagcctcctgcagctacaggggcttccgtaggagagatcctgcctccggatctccctgggagacatggcataggtttctatcactctaggatgtccaaatccatggaatgcagggagcagattctatacaaccccagattctccctgggaagaatgatgggcagggcagcttttcagagccctacagcagtatcccagacctactgctctccctcccattctcttctcactcccccatcctgtctggaaagtccagctttgcctggtcacatttggctttctctgatcagccatgtggtggcagggggaccatcgacatctcaattctatctcctaggctgcccccacaatccaggcagcctctccctgcgcaatgtaagccacctggtctcccaattcctgctcccttccaatccattgtccttacagcagccactggttcccttgatggcctcccagaaattaacaacctttttttttttttttttgagatggactctcgctctgttgcccaggctggagtgcagtggtgcgatctcggctcactgcaagctccgcctcccgggtccacgccattctcctgcctcagcgtcccgagtagctgggactacaggcgcccgccactatgccccgctaatcttttgtagttttagtagagatagggtttcaccgtgttagccagtatggtcttgatctcttgacctcgtgatccgcccacctcagcctcccaaagtgctgggattacaggcgtgagccaccgtgtctggtcccccagaaattaacatcttaattccggaattcctccacccctccccataacccctgtccccgctattgctctagactcgcttcctctattccagggccaatggcttcctgtctgtttctctgctgacctcagggcctttgcacctgctgttttcccttctggtgcattcctgcccagctctgcatctctgcttctcatgacacagtccttctcctccttagagaattcctccctgaccactccgctggttactcctcacccactcacctcaccctgaatattttcctcttggcccttcacacagttggaaatgattgagttcctggtttgttgatgttgtttgagacagggtctttgtctgttgctcaggctggagtgcagtggcatgattttggctcattagttgacctcctggagttaagagatcctccgacctcagcctcctgaggagctgggactataggcatgcaccaccatggctggctaatttaaaattttttgtagagatggggtctcactatgctgcccaggctgagcttaagtaatcctcccaccttggcttcccaaagtgttgagattaaaggcatgaaggaggcgctgtgcccagcctgactgagtttcttatgggtgttctctcccctagtagaacacaggctgtgtgagagcagggactctcagcctggttcgttgtgctatccccagcacctcagcagagcatgtctcacagaaggggctccggaaatccttgtggcacgggtcagtgaccccctcccatttctgagttctcacatacatttgcatcctgacatccagaccttgacatcctgcttccttctgctcctgggccctttgtgacatcacgggctggtttgctaatcactgctgtttgtcagcttcccatcatagagcgcccctgaaaagccccttgtcctgtcctctcttctgctctgcccaggtctgcatgagagttgtaaggcccagggctaggtggcagggttgtcctgaccacttccccaaactgtccctccactgggagatctgcaaagaggggttttcatgcatattcacaggtaatatttaggggcagtgttctcagtgatttacacttgtcaagccgacttcacctgcacaatgaacctgtgagataggcaccaatatggcacccatctgcagaggaggaaaccagcagagaggttaagcagtttgcccaaatgcacacaataggaagtggtcaagccccgattgaagtcagaagagaagctacatggaagatggccgccaacactgtcttatctgaaattattatgaagttttattctatgtattattgtattgtgggaaggcttggggctgctgatgcaattatgggaatcaaaattggttcttgggatgctactttatcctgttttctctacatgggccttgcatctccggatgccttggtcatatgacaacccacagctctcatccggggagaaggggaggcagaagcccatccaatgcccagtagtgaggtcacatgaagcacccaggtttccgggagaaaggaacagattgtggcaagggtggatgtgagtcccttctgctcagggtctacatacagctacaggaagaatacgttctttctgctgcttcccacaggtggccttggagtgtctgtaccatcgagagaagaggattgggattgatttggtccatgacaacgtggagaaaaaccttatccgggtaaggcatctcctggttctgcccagccccctgaaggaggcgggaaggccagcaggtcagagaaattactgagctacctgtcaggagcagaagccacacgtgtcactgtgtggaaagtgagggctcaggaagcatgggtggaggtctagtttgcaatttaggaacagggagtaatggagttatttgaccctcagtcttttcatctccaaaatgggcatgataataatataccaataacaataataaaagctagcgtttattgagcacctactatatgtcataggctgtaccacatcatatgcattatttaatgtaatgataatctataagtgagtgcttggcacatggtaggtgctaaattttcttttattctgggagtctataaaaagaaagtagggcaaaaaaaaaaaaaaaaaaaaaggtggagcctccacaatcaacccttagctgcctggccctggggtcacgtggattgaggcggggccccacgctgacatttcacctcctggggtcgagggtggtcagtgagaggggaggggagagctgagggctctggcctgggagagaagactgtgaggttctaagaggcactgctctttctgacatttttcatttcaggaagtggatttgctaaaatgttgccaagaacagatgagaaaattagctcaaagaattgatatccagatgcggtaagggctttttttttttttaattccctctccttggggtttgttttaggactctcagatttctgggggacaagccagatgggcccacttgtctctgggtggttcttttggtcagtggtatgctggtaaatgttcaacaaccagccttctaggaaaaaaaaaaagagtcctgatcatagtatctgccagtttcgctggtgtaaatgttaccacagtggctgattttaagctgctaatatgatgttactgagatgtgtacaactgactctcacaacccgtgcatcgctggtttctcttgtttacagcgagagccctggccagaggcaactggcctccctgaggcccctcttagcctgtggcttccccatttgagttctgaaccttgggagatgacagagggtgggtggtattaggtagcaaggccaggggctgggcacctccacaagggagctggtggacgcattgagccagaagtcttcaaacaaaatcagctttttgttcttacaagattatgtaaccagtatcccgacaagcctgggggcccctcacataattaaagggagacttaagttttacggggcttggggcccatagtgaagcccttggcaccagctcccccgaaagcagccgcctcacctccacctgcagctggcactcacctttgactctttcagggcacgctgctctgctggtttttccacttcattccctcttgacacagagacacagaaagcacgggacagcctggcaacctggcaatggctgtccctcccgctgcctggtgcacatgggcagttggcgtggatgcagggggggcgggcaccttccaaatcagccctgggagcacatatcttggtttgctgtgccccagaacccacctcctcctctaggagcccttggatcccccgaaggggttagttctgggtgttagggagaaagacatcgcaggcaagctacccatagagcaaagagcttggtcacggacagacacattggagacccctagaaagacatcggggtggaggtgtacagagaagatgcaaatatagcaggagggatgatggctgaaaggacacaaacagagttgaagttcaataatttgtgtgcccctgttctaatttctcacaattccacctatcaccgggactattgttacctatagtttgtctataaattgattcacttaaaaaaaccttaagcacaacagggtgactacagtcaacaataatttattgcacatttaaaaataacttaaagagtataaatgggaatgtttgtaacacaaagaaatgataaatgctggaggggatggataccccagttaccctgatgtgattgttacaaattgcatgcctgtatcaaaatatctcaggtaccccacaaatatatacacctactatgtacccttaaaggcttaaaaaataaaataaaataaataaaaatcaattcagtaaataaaatcccttaaatgttcatatttatttgtttatttatttgtttgagacgaagtctcattctgctgcccagactggagtgcagtggtatgggctcagctcactgcaacctccacctcccagattcatgcgtttctcctgcctcagcctcccgagtagctgggattacaggcccatgccaccacactcagctattttatgtatttttagtagagacagtgttttgccatgttggccaggctggtctggaactcctgacctcaggtgatctgcccacctcaggctcccacagtgctgagtgctgagattataggcatgagtcactgcgcctggcctaaatactcttatttaaacaggcaaattttaacaaagggagaattgggacaggccagtgtctttgttttattgcatttttcttacacttatttttttaattacttattcatttttaattgacaaaagtggtatatgctgtacatataaaacatgatgttctgaaattacgtgtgtatttcaaaacattgaactaattggaactaattaacatatatgttacctcacatacttattttttgtgatgagaacacttaaaagctcagtgattttcaagaacacagtacattgttgttaactatggtcaccatgtctctggaacttattcctcctgacgaactgaaatttgtaccctttgaccaccatctccccaataccccacccccagcctctggtaacaaccattctactctgtgcttttatttgttcgcttgttttagattccacatacatgtgtgatcatgagatatttgtctttctgtgcctgacttattttactttacattatatcctataggcttatccatgttgtcacaaatgacaggattttcttctttttttaaggctgagtagtattctgttgtgtatacatgccaccttttctttatccattcatctgttatgagatacttaggttgatttcgtatcttggctatcgtaaattgtgccgcaataactttgtccattttaaaactgggttgttttcttgctattgagttgtctgagttctttacatattttggatagtaaccccttatcagaggtgtagtttgcaaatatcttctcccatttctgcggttgtctcttcagtctcttgtttgtttcgtttgctgtgcagaagctttttcgtttgatgtaatctcatttgtctatttttgctttgatttcatgtgctattggggtcgttgtccagaccaatgtcatggaacttttcccctatgttttcttctagtagttttacagtttcaggtgttacattttagtctttaatctatttttttttttttttgagatggagtctccctctgtcacccaggctggagtgcagtggtgcaatctcagctcactgcaacctcctcctcctgggttcaagtgattctcctgcttcggcctcctgagtagcaggggttacatgtgcctgccaccatgcccagctaatctttaatctattttgagttgatttttgtctgcagtgtgagatagggctctaacttattcttcggcatgtacctttccacttgtatcaataccatttgttgaagaagctgtcctttatccactgtatgttcttggcatctttgctgaaaatcaattgactgtaaatgcctggatttatttctgggctctctattctgttctttcttccagttatttttgtgatcttctatttatggcaagagagaatggttttccatttgtagctgcgatgggatgtgaaaaaccgtggcgctggtggggacaggagggctgacgtttgggaagtgggatagtttgagccggcagagtgaactaatcccagacttgaagtggggagctggacctcagaggagaaatcctgagactgggatcaggaggccgcttttgcaaccccagatgatgcaaccagaggtggggggatctgggagaaccaggaagactgagacagatggagacagtcccagagactgagagacacagagagagagatgagcactgacatcaaaagagacagagacatgaagagataaacagagacgggtggggagtagggagacagacggacagagaggcacagagtcagatatgccagaagtatctggcaagagatgagatagagacagagaaaggcaaagagaaggagagagacagatatggagaaagaggaaaagaggctgggcgtggaggctcatgtctgtaatcccagcactttgggaggccgaggtgggtggatcacttgcggtcaggagttcgagaccagtctggccaaaatggtgaaaccccgtctctactaaaaacacaaaattagctgggtggtgacacatgtctctaatcccagctactcagggggctgaggcaggagaatcgcttgaacccaagaggcggaggttgtagtgagccaagatcgtgccactgcactccagtccgggccacagagcaagactgtctcaaaaaaagagagagagagagaaagagagagggagatgcttgagcttggatagagaccgagagagatgagagcaactgaggcagacagcaggagagagagaaagcaagcacagagtgagtgaggaagaggatgagagcaggtcagggcagcatttcactttgtggagactggaggccgagccacgccggatggaggctgtttgtcgctgggcagtggctgtgtgtcagatgactcctgccatctcacagcttgtgctgccagagggattggggttatactaattaaccgagagccagccagagcctcattagccaggcagagtctggtgtgtcctcacccccttggggaagctctgccactgacctgctcaggtggccaacaccaggctcttggctcatggttttctgcgaagcctgaggcccgcatctgggcagggtggggtccttgctgcaccaggtgagaaaaggctcttcctgatagagaaggagccacgtttggtcttttcctggtgggctgacagcagggtgagcttggcattggtctggcccttggttgtgggccgagtagggaggacaggactgcctcctctttccctaggcctcatgacaagggccaggcagctggacacgctggactctgaggcccccaggtttccctctaattctctaacatgtttgctttccacatcctggcctcgcttcacattccagctcattaggcaggacagggccccatttctccaggactctgccaatttggaaaccccaagggccccgggactggggttcctcctgctccgacatgacccgagcttcctgataggtgggaaccgccaccactgtgaggatttcacttcctggctcctggcctgctgggaacccctcacccgcaaccaacatccacagcaggaaaaaaaaaaaaaaagatggaggggagggagggagagacccacagagacacacagaggctcagacagagagaaaccaagaaagagacaaaggttagagagacagagacatagacacaagaagggagggagagagaaaggcagagagacagatagagaacagatacactcggtttagctggtgtctgacataccctcacttaatggaagttactcccttctctactctaacaattcttctaaacacttcaaggcaaaagtttcagctgctgcttatgtgtctgtaccatcaactgatctctttttttttcagccaacagggaaacagaaaaaggtccaggcttagaaccttctggaggaaatagattctagctaggatttagcgagtgcctacgtagtattaatatttaggtctgaggtgatcttctattaatggaaagggtgatgggtttttctttaaagacagggatgtaaattttccttttatcatacatttatttacatttttaaagtgattttaggccaggtgcggtggcttatgcctataatcccagcactttgggaagccaaggcaggcggatcgcctgaggtcaggagttcaagaccagcctggctaacatgatgaaaccccatctctactaaaaaaacacaaaaatcagccgggagtggtggcgggtgcctgtaatcccagctactagggagactgaggtaggagaaccccttgaacccaggaggcggaagttgcagtgagctgagatcgtgccactgcactccagcctaagcgacaaaaggaaaactccatctcaaaaaaattaattaattaaataaaagtgattttaaaaaggaaaaataagtaaatagtcgagtttggtatttggcaagaatcgtggaagtgattctcaaatgtctggaatttggcagtaatctttaagtctaagcttcttagccgagataccaaccagccctcctggcttaagccctggccctgatccattgtcctctctttacctcagcccagtctctgatcccacccagccccaaccctacccaattcctgtcttcacctagcccccgaccccgcccagtccctgaccccacccaatccctgtcctcacgtagcccctgactccacccagttcctgatcctgaggtccctaaacatctggtgtttctagcttctctgtgttggcacgtgtgatgttgtcggcttggaattctcattcccccataaggtctactcctatttattgtgaaaacccagctcagacaccttggaaagccttccctgaccaccctctcaccctcagttaatggtttcctctgtgttgtttcatattttcaaacctgcacaatgcccttaccattctgttctgtacatatatacatatattttatatttgttcacacaaatctgtgagcaacctgaagggagtgactgggtcgtcttatttgcgtctcatccctcggtgcccagcatagggtcagacacaatgattgatttacaaagtgatttgacttgcatcaggctttgtccaaagtgtggattgatatcttcaaaattaggtcagcaagctacagctggagggacaaatctggcccgccatctgtttttgtaaataaagttttattgagatgaagccacatggatttttacatatctgcgactgctctcgtgcacagttgagtagttgcaacagagaccatatgacccacaaagcctaaattatttatcatgtaaccctttacggtaagtgcttacccatccttcttctaaaggacagcaggggccaggtgtggtggcttatgcctgtaatctcaaccctttgggaaactgaggcagggggatcacttgagcctaggagttcaagaccagcctgcgcaacacagcaagaccatgtctacaaaaatatttaaaaagttagtcgggcttggtggcccatgcctgtagccctagctactcaggaggctgaggtgggaagagtgcttgagcctgggaggtcaaggctgcagtgagccatgactgcaccactgcactccaacctgggtgacagagtgagactctgtctggaaacaaaaaaaaaagaataaaggacaaatctgtttggattggggggagcctctgggtatgtggtgggacatggaggtgggaagaggactgagaagctactgggtggctttctgggagtccagggcttgcaacacacacctgctgtgtggcccaagctgggtactctgtgcaggtgcatagtccaggaatgactcctccctccctgcagggataaccgggatgctcagcacgtgctggagagggacctcgaagacaaaagctcggcccagtgtatcgatgagaagtgctttaacctgagaaatacgtcagactgcatcagcttcttccacggcatggagaaaattgacggcacgtaagtatcagactccccctccccatccctggcgtgtccaactggagtgagggcttctgctcctgccaacgaatggcgaaggggcatcgtgcaccagttaagtgggaagtggcatggttgaacggggatcctctagcgcaggcggcagaatccaagtcgggttagcttaagacaagatggaatttaccggaggaggtatgggggagccacgaactcaaggggaaagcgggaaggaaaggttctggcagtaggagctgtgtggtcagagcgccttcatctttccatccttgccccaccattcaagatccaaatttcaggaagagagggcatggcattggcttagtgagggtcgcacagccactgccactcagcagtttcaccaaaaaaaaaaaaaaaattccgaaacaagtgacaacctcggcagggagaccaactggggtcggctggtggcggggtggtttaacagagtgaattcttgcttcgccaggcttgttggcttacccctgtaatcccagccctttgggaggccaaggctggaggattgcctgaggccaggagttccaggagttttccagaccagccagagagagagagagagagagagagagagagagacagagagtggaatctggagccaggctacgtggcttcaaatcccagcctctacgctaacactgagcaagtcacttcatttctttgggccatttctgaatctataccactgggagaaaattaagtacccacttcccagggctgctgggagtatgaaaaaggtgggtgtgtgaagttttaagcacagagcctagtatagaataatcacagccaacatttatcaagtgcttactgtgtgacctcattttctcgtcacagcagctatgaggtggtgccttctgtgagcctgtcatgatcgtgggcatatcacagcattgtgaggttttttttttttttttggtatttttcttatttatttatttattattattattatactttaagttttaggatacatgtgcacaatgtgcaggttagttacatatgtatacatgtgccatgctcgtgcgctgcacccactaaatcgtcatctagcattaggtatatctcctaatgctatccctcccccctccccccaccccacaacagtccccagagtgtgatgttccccttcctgtgtccatgtgttctcattgttcagttcccacctatgagtgagaatatgcggtgtttggttttttgttcttgtgatagtttactgagaatgatgatttccaatttcatccatgtccctacaaaggacatgaactcatcattttttatggctgcatagtattccatggtgtatatgtgccacattttcttaatccagtctatcatcgttggacatttgggttggctccaagtctttgctattgtgagattttatgcagaatgaaaacatgcttcccagttggtagtctgaggtctgagagatgctcgggatgagaaagagggtggagtctatcttagttctgccttcttctgttaaaaaaaaaaaaaaatccctagcacatagaattgtgcttggcacatgttggtatgcaataaatttttattgaatagaagaatgaatgaaggaggaagggagggaaagaagaaccacaggaagggaggaagggaagcgagaaggaaggtgttccttggcattctccttggcccaagcctggggtcactttctggatcttacaaatgtcacagtgctgaggtgaccctttgggacttctggtaatgacaactcctggggactttccttctcttcctgacaaggtgctctcctccatggcactggcaaggtgagcaggactttgggggctgggcccccctcatctgcacagggagtccagagggtctctcttcccaaacagattcctctccagaaacctggcagccccagagcctccaatttccacacccaggagggacctgctccttaaagtcccccatctggagactccatctggagaagagagctgctgtttgtagcaactaattgctccccagatgtgctagcttggggctttgtatttgtggttttcttatttatttatttatttatttatttgagaccgagtttcgctcttgttgcccaggctggagggcaatggtgcgatctcggctcaccacagcctccatctcctgggttcaagcgatgctcctgcctcagcctcctgagtagctgggattacaggcatgtgccatcacgcccagctaaattttttgtatttttaatagagatggggtttctgcatgttggtcaggctggtctcaaactcctgaccttaggtgatctgcccgcctcggcctcccaaatttctgggattacaggtgtgagccaccacccctggccttagggttttcttaaagcagggctatgtctgggcggatgaaacaggacgtttggtgactgtctgaattgcagtatctctattcactgcagttctcattaccatggattaacaatgatgataatgatgatggcagtagacaccttttttttttttttttagacagagtctcgctctgtcaccaggccagagcgcagtggcacaatctcggctcactgcaacctctgcctcccaggttcaagtgattctcctgcctcagcctcccgagtagctgggactgcaggcacatgccaccacgcctagctaatttttgtatttttagtagagacagggtttcaccatgttgggcagggagagacaccttttacctggtgtttgctatgtgctagacattgtgctgacagcttcatatgcaacatctcatgaataataaacattttttgggcgcttactctgtccagtgccatgacaaggacttcacatttaaacactcagcaaccctgggggttggtaccattattatctccattttacaatgaggaaactaaggctcggagaggtgaatcgattggctcaagctcacacagcaaatggcagagctgtgattctgaatctacattgaatactgagcctgtgtgttttaccaatggtgccttcctgcctctccagcaaagccagctgtcctctccatctttagagaacaaagactccagaaagcacttccccctactgagacacactgcctgctgaggaggcagactgtctttggcaaattcctccccagggagaatgtgattaagcgggttattttctctggggagctcagctgcctgctgcaggggaggacaagggcttagaggttgctgtttatgacactgacactgtccccccattcagaggcaacagagacactcaaagtaaatctgcatgtttctctctgctgtccttattgtctcctctttcctcagtgtcctgggatgggacgttgttgtgcggccttgaacaagatgcttcactctctgagcctcaggtcttggttggatgaaagctctgaacctgacttagtgccactcctatctccagaagcccgagatgcctgtttattgcttgatttttaactcctgcaaaagccaagcaaaacaatcacacaagctatatgatttttaaaactttctatgcaccatgcaacctaagtgtgctttaaaatgtctgaaaagaggccgggtgcggtggctcagacccgtaattccagcactttgggaggctgaggtgggcgaatcacgacgtcaagagatccagaccatcctggccaacatggtgaaaccccgtctctacaaaaaatgcaaaaattagccaagtgtggtggcactcgcctgtagtcccagctacatgggaggctgaggcaggagaattgcttgaacgtgggagacagaggttgcagtgagccgagatcccgccactcaagaccttcagaagttacccaggacctgaagccaggtcaaagaaatgcatgcccttcctcaaagccttcccagatgagaaaaccccacatagtccattggttgcttgttgcagggatttacatgctctgccaggaagaactttactgaggagttcctcatgtgtcaccacctctaagaagccttccctgcctgcctttgctaatgtagcctgtgtccatgtccattgatctccccagatccattctccagctaccacgctgtgagtcctgcatggccgactatcctctgcagacctctcctgggctctctgtcctttggtttccagatggtttcagcctggaggaggggtaccagcagaagacagagtgtgggaggggagaggctgcgatttcttctcctgctacctccctcccagacacactggtcaaccatggttcctccttttctggggcttttataacacctattgcttccttttctcttgccctttacagctgggatagtgacagcttcatgcattttctttttatttttttgttgggggggacagggtcttactctgttgcccaggctggagtgcagtagcgtgatctcggctcgctgcaatctctgactcccagttcaagtgattctcctgcctcagccttccgagtagctgggattacaggcgtgtgccaccacacccggctaatttttatatttttagtagagacgggatttcaccatgttggccaggctggtctcaaattcctggcctcaagtgatccgcccgcctcgggctcccaaagtgctgggattacagccatgagccatcacattcagcacttcatacattttctaatcccagacgatctcaacacccttccgagtattccatctattcccgtttacaaccctgaccaacacataatgacaccactccatttgtctctttcatcctcctgctgctgctgcttcttttgagacagggtcttgttgtgttgcccaggctggagtgcagtggtgcgatcatggctcactgcagtcccggactcctgggctcaagcgatcctcccacctccgcctcccaagtagctgggaccacaggcatgcaccaccacatgtaggtacttttttttttgacattttttatagagatgtgggtttcaccacattgcccagtgtggtcttgaactcctggactcaactgatctgcctgccttggcctcccagtgtgctgggattagaggcatggctggcccagccctccagtttctaaatcccttcccagcacataacacaatgtgtaactatctcctcattcactgtcaatctccctcctctggcacttaaccgccatgaggacacggatgttgccgttcttgttcatggctctctcctaactgcctggaacaatgcttggcatgtcgtagaagttgaagaaatattccatgaatgaatggcagtgaaagtagcgtggccacattcccatcgcagagttagggggttcagggaccccaatgaagaagcaggcccaaagcctgcttcttggcttgtccacgttgtgtttctggtggtggtggtgtgggtgttagggaaaagagctctctgcgggagcccctctctttgacccactcactgagtgcccttctgccaaccagctgctctctttagggttctcttgcttcccctgtaaaatgagggtattggatcaggacagtggttctcaacaaggggcgactgcaccctcccatttggcagggtcatttggcgatgtctggagccattttttggttgtcacaacggggtggttggggagctactggcatctagtgggtagaggccagggatgctgcttaaacatcccaagcaccctacaatgcacaggacagagaataatcccgacccagaggccaagactgccaaggcggagaaaccacagattctgaggtcttccaggactgctgcaactcacccttgtgcctttgcaggatctccgtacctgagacctgggccaagttcagtaacgacaacatcaaacactctcagaacatgcgggccaactccatccagctgcgggaggaggcggagcacctctttgagaccttgtcggatcagatgtggaggcagttcacagacaccaacctggccttcaacgcccgcatctctgaggtgacggatgtgaagaataagctgcagacgcagctggcgaaggtgagcagatcctcccaggacccctgccttctctgccaagccctcacccttctcccgtgaatctgagtgttatctgggccaagctggccctgcccctggtgccaaagcagtaccctctctcccaaggtctgtggtctttttcttcctaaaaggggccaagggctgagcttcctggggggatttaagcatccatagtccatcttgtcttgcttacaagcctggagcttggcctagctgtgcccaagaggctgtgacactcccaggaccccttattttccatctaagacccatgtggccgagcgcgagtgcagagaacggagcccggcacaccatagtctctgccacttctgcacatcttctccgtccacagcagcatctttggaagtgtaatctttgacttccaaaggcctgaacggtaccgtaacagtctaaaggttccctgctgaggggtggggtgctttttggatctgaggagtctgcagcactgcccgattctgtcgtctgcgtgctatgcctacaccagtgtgccctttaggcgttttgcgtcatgctttttcacacctctgggttggctcttggagtcctctttggatggaatttatagtccctgctcaatgcaaatttagattcccactgggtgccagatgctgcgctaggcactaggaataaaatgaggagccgtataaacatgggcgctggcctctggggacttgacattctcctggaggaacagtggtggctgtgaaatttatacacagaaagaacttggatgatagtcaagtcagagggaactagccttgaatttgtgtttgcagaacagtacccctttttaaggccaagcacagtggctcacacctgtaatcccagcactttgggaggctgaggcgggcagatcatttgaggccaggaatttgagaccagcctggccaacatggtgaaaccctggctctactaaaaatagaaaaaattagccaggtgtggtggtgcttgcctgtaatcccagctacttggggaggttgaggtgggagaactcgcttgaacttgggaggcagaggttgcagtgagccaagatcacaccactgcactccaacctgggtgacagcgagaccccgtatcaagaaaaaaaaaaaaaataagaactgtgccctttcttattgtgtctctatctttggggggattagtgggctgcaggcagggtttgatggaaattacagtggtagtttcagcccacctacatctgccacccgttgatctggtactccaaaagagacaataaaataaataaataaagtttatttttcttttcttctctctctgttttttttttttttttttttttttctgagatgatcttgctctgttgcccaggctggagcacagtggcacaatcacggctcactgcagccttgaactcctgggctcaagcgacccaagtagctgagactacgtgtgcgtgccaccacacctggctaggttttttagttttttgtagagacagggtttcgctatgttgcttaggctggtctcaaactcctgggctcaagcagtcctcccacctcagcctcccaaagtgttaggattacaggcgtgagccaccatgactggcctcgaaacaggagtttccatgaaatcattgcaacatttttatagggagggagcaagggtgggtgagccagatattctcatgggacccacactgggtggagcagagaagcaggggacgttgccaccgagaacagatcaacagggagttgagcggccaaaagttggtgggaagaggattccggagagagcagcaagggcaaaggaagcgtccgggatgaagctggaggaaggggcaggtgggtctgggtaggcctggtgaagggtttggattcctacctaagagcaatggggagcctttgaagattttaagcaggacagtgtttggatccaagcttgtccttttgttgatttcttttctgcctgcgtggcagaagggacgcagaggttaagaatggatgcagcggccgggcgtggtggttcacggctgtaatcccagcactttggaaggcagaggcaggaggattacttgaggtcaggagttcgagaccagcctggccaagatagtgaaactccatctctactaaaaatacaaaaaatcagctgggcatagtggcatgcacctgtaattccagctactcgggaggctgaggcgggagaatcatttgaacccaagaggcagaggttgcaatgagccgagatctcaccactgcactccagcgtgggagacagagtgagaatctgtctcaaaaaaaaaaaaaaaaaaaaaatagaatgggtgcagtggttaggaggctccagaagaggcccagggagtggggaaggctgcctgtgctgtggtggtgacatcaagtggaagaaggaccagaaaagggtgagatacctggagaaggcaaagttggcatcgagttggcctgtgcaccttccctttatctttcatgaactattttcctactaatcctctaggacagggttggcaaacttttcctgtcaaaggctagatgataactgttttcagctttgcaggcaatacggtttctgcctctatactgcaaaagcagccgtggacaatctgtacaaaaatgagtgtggctgtgttccaataaaacttcacaaaactaggcagtgggctggatttggtccacaggttgtagttttgacaacccctgctctggaacttagctcaaaagtcgcttcctccaggaatccttcctaaactccacggtttatttgcactcaccatctctgggtggccactgcgttctgagactgtgttttcattgctccttccatctcatatcttttggctagaagcactgaccctgagccagactgcatggttatgatgaatcctctataaacttggacaactttcttaacttctctgagcctcagtctccttgtttgtagaatgaggataggaattactgtcacaggaggctgaggcaaggaggatcacttgagcctgggaggtggaggctgcagtgagctgtgattgcaccactgcactccatccaacctggacaacagagcaagatcttgtctcaaaaaaaaaaaacaaaaaaaaacaaaaacaaaaaataactgccgtgaggattgagttaatgcaggcataacacctgaaggagtgcgggcacatagtaggcaccatgtttgtgctagtggctgtgatcttaatgtactagttgatttacttgcctatatgttttcagagcactgctcctgatttaaccttgtccccctactgcttaataactgcctggtactccttacatctttctgcaatgaatggaaggaatctacaatgttgaggtggtttttttgagacagtctcgctctgtaacccagtctggagtgcagtggcgcaatctcggctcactgcaacctctgcctccctggttcaagtgattctcctgcctcagcctcctgagtagctgggattacagacaccccccgccatcacgccccagctaatttttgtattttttgtagagacggcgttttgccatattgcccaggctggtcttgaacttccgggcccaagttccctgggctcaagtgatccacctgcctctgcctcccaaagtgctggaattacatgtgtgagccaccatgcccagcctgcaatgttgagttttgtactgaggtttttttttaaagaatgaagcatgcatgaatgaatgccttaaatgtccctttttctttttttcatgcaaagacccatttttattatggtaaaatacacataacataaaacttagcattttaaccactcttaagtgtacagttctgtggcattaagtacattcatacattgtgcatccatcaccacaatccatctccagaacttttccatcttcccagtctgaaactctgcacccattaaacactccctccccttttccatctccccccatatccatggtaatatcatttggctgtgtttccacccagatctcatcttgaattatagctcccataaaccacatgtgtcagtgggagggactcagtgggaggtaattgaaccatgggggcaggtttttcccgtgcttttctcgtgatagtgaataagtctcttgagacctggtggttctataaaagggagttcccctgcacattctcttttgcctgctgccatgttagacgtgcgtttgctcctcctctgccttccaccatgattgtaaggccttcctagtcatgtggaactgtgagtccattaaatctctttttctctataaatatcccagtcttgggtatgtctttattagcagcagcattagaacagacaaatacaagtaactaccattctgctttctgtctttgataatttgactactctatggacttcatataagtggaatcatacagtagttgtcctcctgtgactggttaatttcacttggcataatgtcttcaaggctcatccatgttgtagcatgtgtcagaatttccttctttttcaagtcagagtaatattccattgtctgtctataccacgttttctttatccattcatccatttatggagacttggtggcgtccatcttttggctcttgtgcatcttcttttaatgaggcatctcatacggtggatcaaatgtagttcattgtcatgtttcattgcctgaagtttgtggtctggggatgacttggaaaggctcttttagttggctattggtacctggtttctcacctgtgaaacagggataagaatttctacatggtaacattactgtattaatgaggtaatctctggagctcttaaaacagtgcttgacaaatgataaacactcagtaaaaaggtaactgtaagtattaatataattactgatggagagagaaaggatcttttgaatggaggtggggagagcaaaaccttttcgctttccaaattcctctagtgaggatcccttgagccccggagtttgatgctgcagtgagctatgatcgtggcactgcactccagcctgggtgacagagcaagacattgtctctaaaaaattaaaattaaaataagttgaaataaataaataaatacataaataaataaataaataaaaataaaaattcctccagggaagttttgaattattactaacaacctcatcactacagactggagggtttttgcaacctcatggatttttattaatagtcataatttaatcaccagctgttctgcaaataagttagcacccatctgaaatgcaccaaactccaaccctacgctattgacattttcctgagcaaggatttgtcttctggttggtgaatttcacatggtgttattctaaaataataaaggaatttgatgcaatgaagataaatgtatagcaaccatttcacttttcaacagtttactttggctagaggatttgaaatgctctcttctttttttgaggtggagtctcactctatcgtgcaggctggagtgcagtgacgagatcttggcttactgcaacctctgccttccaggttcaagtgattctcctgcctcagcctcctgagtagctgggcagctgccaccatgctcggctaatttttgtatttttagtagagatgaggtttcaccatgttgaccaggctggtctcaaactcctgatcccaggtgatccacccgccttggcctgccacagtgctgggattacaggcttgagccaccgtgcccggactgaaatgctctctttaaaaatgtaactgttattagttgagcttagcctgatagtccttggcaaaaggcatttctggaaaattccaagtgcccatccttacctatgctgcaaggcagttatttcccaagtggtcacaggaatccaccttgtaagaccaaatctacacggctccacgtgcagacagtggtttggggctgtgcagacagcctcatctgttcactgggatgctagagttctgtcacctcggccacaccccaagcctcatagcttgccccggggcctcatccttgcactttgaggctccaggtatcactgtgtcatactgaccactgctagcaaaggagctggtgacttctctggactaaagaagttggtggccacagagtgggttgctgcctttgagtgctgattcctctgagacccagggccctggaaacttccagaaaaacaacccctcatttacatgcaattacccaagtgaatgtgcatttgagtgggggatctcttaatgtgtagggggaaaagatgcataaatatggtttttgggggtaggatgtgtggggtcagggatacttctatggagaaagtgcttattctgacattgtgggaactagaccctggcaggtgaaatattatatgtgttacatggatatagcattaatatcactgaatcatacaatgagaaggttattccttcttcattgcttctgaccatctcaaaagtgctagaatgccttccttacctcttttaacacctgccaatctcccttttataatttttttttggagacagggtctctctttgttgcccaggctggagtgcagtggcacgatctcggctcactgcaacctccgcctgccaggttcaagcgattctcctgcctcagctttccgagtagctgggattacaggcatgcaccaccttgcccagctattttttttttgtatatttagtagagatagggtttaaccatggtggccaggctggtcttcaggtgatccaccggcctcagcctcccaaagtgctaggattacaggcgtgagctaccgtacgtggcctcacctgttgataagcatttcggttgtttccagtttggggctgttacaaataaagctgctgtgaacactcatgtacacatatttgtatgcactctcacagagttcaaaaaatatttggtaaaaaatggtgatttcacataaaaaaatttcagatttccagcgtctcttgaaaaattagtagctctagcaattcagagctcatgtttctacaggggaacagtgggtaagggttgagtggctgctgcctctctttgggtcaggtgctccagttagcctcagaccccaccactccctattacagcacgcttccctcatttgcattatttacttgatcctgtagccctgtatttgtgcactctgctttatatatcagaggaaactcagacaggcagataaacaaaacatccaggcataggaagaggttgaacagaacagagaagggctatgaattttaaccttgaagggctttggtttcattctgaagtttctttggggttttgactcccaagcagccattgttagcatcagcaaaaccaccccttcccaggaaggcctgggcaggaaggcctggcgtctgaggggtgagggcccctgctggtgatctgaggccctgcgtgtctactgccaacccctctgtttgtccaaggaggtctggaacccattgtgcagtgggaaatgcttttgtgctttgcagccgattccttccagcactggagcctgcagccaagctactgacggctggtttctaaaaccggcccagccctggggaagtggagctggcagcctggccctgtgctaccctcctcatgagacaccactgcatcccagggagaaagtctctctcttctctgatggtgtcacggaggaagactcatcatgatgccgacctctctttaacacctatccttcctttgcccgtctgcctttctaacaaaggcatcaggcctcaggcttagaagctttggaaagcaatagaacctagatataattattaacttcttttttccagctaggtgtggtggctcacatctgtaatcccagcactttgggaagccaaggcaagcagatcacctgaggtcaagagttccagataagcctggccaacatggtgaaacctccgtttctactaaaaatacaaaaattagctgggcatggtggcgcatgcctgtagttccagctacttgggaggctgaggcaggagaatgacttgaacctgggaggtggaggttgcagtgagccaagatcatgccactgcactccagcctgggcgacagagcgagtctccatctcaaaaaaaaaaaaaaattattaacttatttttcccattttgcctattgttatggtaccctctattggtggaaaacaatagtagttttccacttgtggaaataatttaaagatttcatttcaaatacatatgttaaagcctgaaacaggctgatttgaagaaaaatattaaatgattatgtagatggtatgtggatatgggaaatatgatgacgatgctgcccagtacctgaaatttgggaatgttaaaagaaaaacttaaagcagattaaatttaacagaatttaattgagcaaagaatgattcgtgaattgggcagccccctgaaccagaatggattcagagcaaccccaaagctgccacgtggtcggatgatatttacagacagaaaaaggaaagtgatgcacagaagacggaagtcaggtacagaaacagccagattggttactgctcattgtttgtttgccttatttgaacatgatttgaacagttggctgcctgcgattggctaaaattctgtgattggtataggagtcggttccaggctgttcacacatccagttaggttacagttcactgtgtaggggagagatctttaacatacgtaaggaaggaagccaggcgtggtggctcatgcctgtaatcccagcacttttggaggctgaagtgggaggatagcttgagcccaggagtttgagaccagcctgggccacagagtaagatcttgtttctacaaaaaacataaaaattagctgggcatggtggcatgcgcctgtagtcccagctacttgggaggctgaagtgggaggatcacttgagcccaggaggccaaggctttggtgagctgtgattgtgccactgcactccagcctgtgcaacagagtgagaccctgtctcaaaaaaaaaaaaaaaaaaaaaaagtaaggagccagtgttaggctgaatgaagtttagttcatttcatcggaatccctggcagaatagttacccctgcatcagtgtagatagttcatatgggcaactgtgccatgaaagtgactgccatgttttaggaaaacacacccgcatcagtattcaaataaggaaacagccgtatgtcctgatggagggatgaccaggttgcaagggcacttttgacgagacacagttctcacgccttgtattgacttcagaacaacaccccatccctggcttcataaggtgatccacccatgcagacactcagtaatcaatggctgctgttcattcctgtgcaggcgttccctctctctgcagtctgcattttcttagaagttgtggcctgagtaattcttcactgtagtggttgtcagctgaaggcagttgtgtcccccagaggacacttgaaatgtttggaggcatttttggttgctatagtttggtgagggggtgctgctggcatctactgggcagaggccagggatactgctaaacatcccacacggcgcagggcagccccccacagcaaagaatgtttgggcctgaatgtcagtagtgctgaggctgagaaaccttgttttaaaggaattccaggcaccaccgaggaacaggaggggagggtttgaggaggtagaagacctccagaattcttcagatctgcgtgagtcctgaactcatgaactgttgcctgaacaggccaattgccctcttataaactacaagattccagaagataggaagaatctgagtgtataaaacctggactgtgcctactccccgtggcttggtaaacagggtggttcttcagggcatccacacccctatatgggtgcacaccaccatgcccggctaatttttgtatttttagtagagacaaggtgtcaccatgttggccaggctggtctcaaactccgaggtccaccagcctcggcctcccaaagtgctgggattacaggcctgagccaccgcgcccagcccctgttctgttgaagactgcgttcctgtaggtgctgggcttggtgtgaatgtggctttcagaggctctgctatctgtgggtttccagctatctcaggctatagctctcaggaaaaggctcagggccatatgcatgcataggtaggtctctacctgatgcccaccttagcaccaggaggaatcaaaagcccttccagtgtcacgtgggctcaggtctcatcatagtacgtgggtggtgtgtgcctggatggacccagcatgaggggtccctgggagttcagacatgggaaattctgagagctgtgccaaaaggtgggctggtcagggtgactgtgtcacagcttatcagttcatgggaacactatgccaaatgggagaggagctgctggaatcaggaaggtggagccaaggtccagagctggggaggtaggcgacagatgcaggaagttggagggaccatgcaggagatggagagaacgaacacgggagagggcagcacaaacgagactgtttctagctcattttgtgaacaccacctatgctcaggaacgctagtacttctttcctcccatggctggcttcaaatggtgacagccaatcatatgctttgcctggaagccctgggcagggcaatcactgggattggttcctggtgagatgagaagaatataaggtgcagcctggccaaggcagagggttgcggtgtcatctcccgggtaatgttatgccccagcattcccctaattttttccaagtgatgactcctccacctttgtgtctttgtctgcttgctagcatgggacctactggctagcctcacctatgctccagctttgacatctgctggcctcctccttggtccagcctccccttccatctccaccttctgtgtcccgacaggtaagacccatagtgtattgcagagtgctgggctcatttctggctccagcacttcctggctgtgtggccaaagtcaggttgccctacctctctgtgcttcagttttttcctctgtcaaatgggagtaatgatgattgacaagcagttgtgagaataacagcagctgtgcccatcccttagtgataatgactattagctataaaaatagtacaaagctatggtctgctttctcatctgctgatgtgggagggatgacaaagtaacggaaagaacctggcacctggtttgaattttggtatgactaaggggtcttgaggaagtaactaacccttctgaatctgtttcctaatctataagaaaggaacaatcctaccagctgtgaggaacaagtgagaaggtgcaggtgagccgctctcagccttagtgccacattggaattgcccagatgcctgggcctcactttagggattctgatttaattggccagggtctggcctgcagcagatctttttaaaactccccaggtgactctaatgcacagcccaggactgaggaccaaaagttaggtcttcagaccagtggttcttaaagtgtggtccttggaccatcagcatcagcattacctgggaatttgttagaaatgcacgttctcaggctccatccaggacccactgaatcagaaagtctgccagtggggtctagcgatctgagttttaacaagcccgctaggtatatcttccaggtgtagacatgcaacaattatctgttgttccctccctccctcttccttccctccctgcagcagatatgtacttagcccatcctatgtgctagactgagttaggcgctggggattcaacagtgaacaacagacaagatctctgccctcagggggcttacattctagagggggaaatagagttaaaaaaataagcaaacacacaattaattaaaagtggtaataagtgttaagaaggaggccctcaaaggcctgagatgatgaattatcatgaatttttttaagagcatattggtctctcaggcaagaaagcttctacccgtttctaaccccattcaggactttcaggacctctgacctcagacagcctctcaacagctgatgcatgtgctggcctgacatattccgaaagcagctgggctaccacttgagagaaacggctgcgagcaggacctgctcaacatttatctcctggagtagtggttcccaaccagggtgaatttgcaccccactggcatttgccaatatctggagacatttttggttgttgaaatggctgggggtggagaatgctactaacatctagtgggtagagaccagggatgctgtgctaaacagcccccaatgcacaggacagcccccacagctgagatatatctgggctcaaatgtcaagagtgccaagggttgagagtcccagctctggggcgttcatgctctgaatccctgaccgggtccctccggagcgctcctctcctctttctctctctccttgctcctgaatttggctgaacttgaaaatcttccaccatttgaccagaaaaggatttcaagctgccttcctctttcctgagctggggatctgcactgagccaagcatctccttggaaactccttggcttcatgcaatttggaaaacaataaatttgcaaggttgcacaaaacatccagaagcctaaagctggctggaactactaaatccatttttttccttccacatcaaaaataatttcttggccttagaggctttctccactgtcacaagacacaggcagatagttttacatggtgaacaaccctgccaaacatatctctgctttcagagctgttgggtggatttctagtccagccaggaatatcagcacacttttccactgagccgaggttggttttatctgaggcagacctgataattgcctttcacaccccatgcatggccagagaccattcccagtgctgacctcaaccctttccacattctgggtgcagggttgagggtgagtgggtggatggagtggagatttgcttccggcttctcctctgcagggggtgagagtgggtgatcataattgagttttccatcctgctgcaagccgaaggagaaagaaaatgataacttactgtaacaaagacatattagccttactgagagctttacttaggtgagcttatctttccctcccatgaagaaggggttattattagacctgttttacagatgaggaaactgaggactcattacaaaaagtgatttgcctaaagtccccaccactaaccactccagctaggaaatggcagagctgtgttttactccaggtggtcctgtcatgggtgcaactggctggggccagtgctgtggatggtaaaagaatttgccaagatagtcatgggtaaagaaaggcagatgtattggagaaagtacaaggatacgttgcaagaaagcaatgggcagcacagcacagaaggggctgcctgcaaagaggcaggagctggaaggaagttttatagggtggtggtgccggggctacgtgcagaacaaagtatttgggaacagaatgctgtgcaagtgagttgtttgtggttaaccgtctctcagaacaattgttctccccaacctggggccgcctcctcgttgttgctgacttaggactccacaagtcctgctctagattctgagcttcaggttaatagggacacttcccccacctccacccagccttatgacaacagtaataggtcaacatctaaagcagcagttctcaaacaaggtgattttgcccccatttcccccaggggcatttggcaatgtctgaagacatttagttgtcacaaatgggggtgcgtgctactgatgattggcatccagtgagtagaggccagggatgctgccaaacatcccacagtgcacaggacagtccctaccccccaccatggagaatcacccagcctcaaatgtcaatagtgccaaggctaagaaaccctgatctgctagcattaaggtttaatttaagaagagagaaaggaaaaaagatagtagataggtagatggctaggcagatggtagggtagatagtgtggaggctgagggacccagggctctgaagggcttactgtgtgctggccacagtgctgaacacattacacgggttacctaaatccatcctggaagtcaccttctaggatagatgctattatcatcttctttatacacatggggaaactgaggctcacagaggtttggtgatttgccaaggccacatgcttggcagtggctggtggctccccaacctctcttctagaaggttcctctggattgtagtgaggtgggcacactggaatccgaataccactggcctctcctcactccgcacattccataagttctcaagtccttcctacttcatcttttggatactttggtgacctcgtttctttagcaattgtccacactgcctgggtgtgagtcctcctgtctctcagcttgtccagattgtcccctctgtctatcctccaaatggcagccagagagatctgcatgaaactacaaacataatcatgtctttctcttgctttaaagctttaatatgcatatgaatagcttgggagtttgtaaaaatgtagattctgtgctgagatctggggtggggcctgggtttctaacaagctcttcaagtccaaagatgctggtccagggaccacacttggagtagcgaggtgctgcagaaattgttctctgaacacagaaaccccagaggagcagcagacttacatgagatggacagctttgggggattgtgatttcccctggaatagtttataacaggggttgcaaactcacagccccaagggccaaatccccgcccctccgcctgtttttgtaaatagttttattggagcacagccatgcccaatacattttcatgttgtctgcagctgcttttgtgctacagtggtcaggttgagtagtttcaacagagatcataaagctgtatattgagacttgcagcaatttaaagaggatggacttgaagaagaaaaaacaaaacacagccgggcgcggtggctcacgtctgtatcccaacactttgggaggccagggtgggcagatcacttgaggtcaggagttcgagaccagcctggccaacatggcgaaaccacatctcaactaaaaatacaaaaattagccgtgcgtggcggtgtgggcctgtaatcccagctacccaggaggctgaggaaggagaatctcttgaacccaggaggtggaggttatagtgagctgagatcatgccactgcactccagcctgggcaacagagcaagactctgtcttcaaataaataaataacacacacacacacacacacacacacacacacacacacacacagccttgcactcctgctggtaacattctcagactggcttttgaaggaagtggcggctctgggcatgtgtgggagtttgaaggtggaattcatagagaacattacctggccagtctctgtctcccggatgaggagatagcggctcagagcagtcaggggttctgagtgggggtctgggccccacagttggtttgtgttagggctgagatgggaacctgggcctcctgactgaccttttacctccaggacaccctgcacagaattctgccagcaggtgggggtggggtggggggagttacttaacatgaaaccctttggtcagccaaaggtgggggcatgtggcccaaagagccacctgccacctgccttgggcaggctctttttctgagccacattccaaagactgaggagagcccttttctattacacaggcaacccccgtcttgaccccttacactggaataagtgggttgagggaggctgggctagggtgggggatgttaaattggatcccatactggagatctggggatctgcctctctccagctgtgacctcatcacgttgcctaatgtctcagaatgttgcctgtgatatccagggaattggattaaatgcttctgaaggtggattccttgtaaattaaaatagtaatacgtattgagagtggtggagacaaaaatgagttttttcctttattaaggtgaaattcgcataacataaaattaactactttaaagtgaacaattcactgccatttaatattgataatattgtacaaccaccacctctacccagttccatttccgtcaccccaaaacaaaaccctgtgcccactgaaatctatcctccccaaactttccccattcacctttcacctttaagctatcgtaacactaataatgagcgtacaggcctttcatggttttcttattttgaatgtgaatacattgatttgttttctctgcggttgccttattaaaactttttttaaagtgaggtattgccaggtgtggtggctcacgcctgtaatcccagcactttgggaggttgaggcgggcagatcacgaggtcaggctaacatggtgaaaccccatctctactaaaaatacaaaaaattagccaagtgtggtggtgggcacctgtagtcccagctactcgggaggctgaggcaggagaatggtgtgaactcgggaggcagagcttgcagtgagccgagattgcaccactgcactccagcctgtgtgacaaagcgaggctccatctcaaaataagtaaataaataaataaataaggtataacacagcaaagaacacaactgtattaatcttcaaattttaaaaaatggttagtcattatggagacataatagttgtacatattcgtcaggtacatgtgatatttgactgcattaatctgggtacagtttgaatttgatttttacgtgtgtgcgcacatgtgtgaccagtacctagttcagtggctctcagtcatggggtgattatcccctcaggggatatttcgcaatgtggttgtcacagcttgcggggtggatgctactggcatttagtgggtagagaccagggatgctactaaacatccttcaatgcacaggacagataccacacacagaatgatctggtcccagactgggcaccgtggctcacatctgtaatcctagcactttgggagactgaagtgggtggatcacttgaggccaggagttcgagaccagcctgaccaacatggtgaaaccccatctctactaaaaatacaaaaattaaccgggtgtggtggcgcatgcctgtaatcccaggtactcaggggactgaggtacgagaattgcttgaacccaggaggcagaggttgcagtgagctgagatggcaccactgcactccagcctgggtgacagagtgagactctgtctcaaaaaaaaaaagaaaaagaaatatctagtcctaaatgtcactgaatgtcaataggtgatgaggttgggaaaccctgttccagatcaaaggctaggacatttctagttccaggagcccccctcataccacctctcagtctacaccccctccccaaaggaactatcattcttacttctatcaccagccgttagatttgcctggtcttgaaattcatattgatagaatcatgcagtatgttcttttcttgtgcttggctgcttctactcaatatagtattggtgaggttcatccattgtattggtatgtgtgtgttagaagttgttttttaccgctggatagtggtctattgtggggctattccacaattgatccatcctcctgttgatagatgtttaagttgttatgaacattcttgaacattcttgcacaaatcttttggtggacatatggactctttctcatgggcgttcccaggaacggaatccctggctcatagagtgggtgtatcttcagcttcagtaggttctgtcaaacggcttttcagaggttgacaaatattgacttccaccagccgcatataagtggtccagtttctctgcatcctagtcaacacttagaattgtcatctctttcatttagattacaagtcaataatcacattcaaagacaggggatacaaagtttcttttgtgggtgagtaatgaaagtgttctaaattagattatagtgatggctggacaactgtaactatactgaaaaccacagtacattttaagtgggtgaactttgtggtaaattgtatctcaataaagatgttggaaaaaattgaaaggggaggccgggcgcagtggttcacgcctgtaatcccggcactttgggaggccgagccgggcggatcacgaggtcaggagatcgagaacatcctggctaacacggtaaaaccctgtctctactaaagatacaaaaaaaaaaaaaaaaattagcttggcgtagtggtgggcgcctgtagtcccagctactcaggaggctgaggcaggagaatggcatgaacccgggaggtggagcttgcagtgagccgagattgcgccactgcactccagcctgggtgactgagcgagactccatctcagggaaaaaaaaaaaaaattgaaaggggaatgacttttctacaacgtgacttaatgttatcatttaccacttaaaatcactttggaagtcattggttatagcactggattcactcctatttctctactgtcttatcctcttgattcctatcctaaatacagttgtttaaaagcagctctaggccgggcatggtggctcatgcctgtaatcctagcactttggaaggccaaggcgggtgcatcacctgaggtcgggagttcgagaccagcctggccaacatggtgaaaccctgtttctactaaatacacaaaaaaattagctgggcatggtggtgcatgcctgtaatcccagctactcagaaggctgaggcaggagaatcgcttgaacctggcaaacggaggttgcagtgaaccaagatcacaccattgcactccagcctgggcaacaagagtgaaactctgtctcaaaaaaaagaaaaaaaaaaaaaaggcagacctaatttttggctttatatacaactaattgtccatcaatctgagtctaggcttgaatttcaagtcaaaaatataggctgggtgcaatgcctcatacctgtaatcccagcactttgagaggctgtggtgggaggatcacttgagcccaggagttcaagaccagcttgggcaatctagcagaccccatctctacacaaaataataaattagccaggcatggtggtgtgcatctgtagtcccagctactcaggaggtggaggtgggagggtcacttgagcccaggagatcaaagctgtggtgaggagtgattgcaccattgccctccagcctgggcaacaaagcaagaccctgtttcaaaaacaaaacaaaaagtagtttgcatgtacccagttgaatacctttctagagagatcagtataacctaaatgtttgtgtctttggttatcttttcctcttgacatcagtttattatatctcaggtgtttgtattcatttctaggggttcacttctataggccttacctctttggcttccaaatttctcaataaataaatcaagatggctgggtgtggtggctcacacctgtcatctcagcactttgggaggccaaggcgggtggatcgcttgagcccaggagtttgaggccagcctgggtaacatggtgagaccctgtctctaagaaaaataaaaataattagctgggtgtggtggcacacgcctgtagtcccaggtactcaggaggctgaggtgggagaatcgcttgagcccaggaggcatagattgcagggagctgacatcacgccactgcattccagcctaggtgatgagcaagactctcaaaaaaataaaaataaaaataaataaatcaagagcagtggttctcaacctggggcaattttttcctctagggggtagttggcaacgtctggagataattttggttgtcacactggaagtgggtgctactggcatctagtgggtagagaccagggaggctgctaactaaacatccttcaatgcacaggacggtctcctccacaaattttatcaaagagtctatcaaaatgtcagtagtgctgaggtcaagataccctcatcacggatgatttgctatgaactctttggtcatatatgacaactcatttgggattaggttcagccacatgtaatagaagaccccaaataacaccagtttaagtaagttagaagtctactttcctctcacataaaataaatcttgggttgcaagatggcttcatggtatcatcagatgcccaggctgctatttttctgcttcaccatccaagcatttatttttcacacttagacctcatggtccaaggaggctgctggagctccaccatcacatcttaagtttgagctagcaggaagatacctgagaaagagaagggtacaaccacccccttttaaaagagacttcccaagagtcccaaacaacattttgattcctttccactggctagaattagtcacatggcctggagctacaagggagcctggaaaatgtagtcttttatagtgttccacaggttaagaggaagtgggtattaatattgccctttctatgtgtcaactagccacaatgccacaaacatataaacatacataatcttacataaccctcacaataatcctatatggcaggccttaaaaatattatttcataattttaaaaaaatactgaggtttagacagatcaggtaatttttacaaggttgaatagggggtaagtagtggaactgggattggaaccaggagttccggtgggttctgaagtcctacttttcctaatggactacactccctccgtttagactgggagcgataagaacgtgtaaatatggttggaggctgtttgtaaaggcaacattgtttatgtaattgggcttttgagttacccgttcagcatgtgtgtgtatgtaaaagagacaacagttcttgaaggataaatgtagtcctcaattgtttttttaggaaaggcagttttttctccagcaataagtctctcttcctgccttacagaatttaagttgcctgcaaagacaaattctttcaagcaaatctgaatttcctattgtcttacattaaaaaacaaaaaaatcaatgatcccaagtgaaaaatctcgtcacagactggggggggggggtgggggaggggaggggggggagacaggacagtccatggcatggtggcagacactggaataagcaatttacacactgttttaagggtctccagagaaacagaagcaatacgatatatagaaatgtatctgagaggagatttgttgtaggaattggcttgtgaggttatggaggctgagaagtcccacaacctgtggtctgcatgctggagacccaggaaacctggtggtgtaattgagttccagtcctaaggtctaagagtcaggggctgaggctgtaagcttccgtctgagtctgaaccagcaactctgatgtccaagggtaggagaagatggatgtcccagctaaagcagagagagcgaattcacccttcctctgcctttttgttctgttcggaccctcagtgggttgggtgatgcctgcctacgttggacatgaccgcagagttcatcaattcaaacgttagtttcttccagaaacaccttcacagacacacctcaaaataatggtttaccagctatctggctgtccctttaagttaacatatacaattaacccagtcaagccagtcaaattgacatataaaattaaccactggctgggtgcagtggctcacatctgtaatcccagcactttgggaggctgaggtggatggattgcttgagcccaggagtttgagatcagcctggccaacgcgggaaaacctcatctctgtgaaaaacacaaaaattagctggatgtggtagcatgtgcctgtagttccagcaactcgggagtctgaagtgggaggatcccttgagcctgggatgttgaggctgcagtgagccataatagtgccgctgcagttcatcctggacaacagtgtgagaacctctctcaaaaaaatgatagaacagccaccacacacacacatgtgcacacacacacacatgcacacacacacacacgttcacacacacacaattttacttagttcccccagtaaccttgtgggcaagtgtttttcttttgtttttgtttttgtttttgttttgagacagagtttcactcttattgcccaggctggagtgcaatggctcggtctcggctcactgcaaattttgcctcccaggttcaagtgactctcctgcctcagcctcccaaatagctgagattacaggctcctgccaccatacctggctaatttttgtgtttttagtagagacggggtttcaccatgttggccaggctggtctcgaactcctaacctcaggtgatctccccaccttggcctcccaaagtgtttggattacaagcgtaggccaccacacctggccgggcaagttattattaagcctgtttttacagacaaaagaacaagtgtcctacacagtgtctggcagctagaaagggctcaatcgatgttgaatgcatattgcatgaggcacagagaggttgtgatccatgcaaggtcacacagcaggaagtggaattgaacctacatctgtgcaactgtagagaggctcaggaaggtgaagtaacctgtccccaggtgtacagcacatgggaggcttaggactcctgctccccagtcttgcctcatctccactggcaggcagcctactgtatgcaaagcacagagtttgggcgggaaagggagtgaggtgagccgtctacgccaccaccctcttcccaccagagttccagctcccaggcagggctgggcggggaaggcagggctggctgccagacccaggatgccaggactcctcccatggggtgaccccctgagccaatccccagcagccttgcccagccactaggatatgccaggctgtgccccagaagcctcttttccccagattcctccaacttcatgggaacaggaaggttaacatccctggggaggggacctgcagtggggactctggggaagcccctcagagcttgggggatgggcagagagatgccagctctgtgcatgtgtgcgtctctgcctgtgtatataagagattgttctacctgacctggagagggagggtgtgtgtgtgtgtctctgcctgtgtatataagggatcgctctacctgacctggagggtgtgtgtgtgtgtgtgtgtgtgtgtgtgtgtgtctgcctgtgtatataagggatcgttctacctggcctggagggtgtgtgtgtgtgtgtgtgtgtgtgtgtgtttgcctgtgtatataagggatcactctacctggcctggagggtgtgtgtgtgtgtgtgtgtgtgtgtgtgtgtgtgtgtgtgtctgcctgtgtatataagggatcgctctacttggcctggagggtgtgtgtgtgtgtgtgtgtgtgtgtgtgtgtgtgtgtctgcctgtgtatataagggatcattctacctggcctggagggggtgtgtgtgtgtgtgtgtgtatgtctgcctgtgtatataagggatcgctctacctggcctggagggtgtgtgtgtgtgtgtgtgtgtgtgtgtgtgtgtgtgtgtgtgtttgcctgtgtatataagggattgctgtacctggcctggagggtgtgtgtgtgtgtttttgcctgagtatataagggatagttctacctggcctggagagagtgggagggcaggactttcctttggcatttttcagagtgtgtgggagaaaagcatgaactgtgggaagagctgggcatgccacctttgctctgtgaccagaagggtgtctgcgtctgccagctctgtgtgccgaggcagtgaaggggttccatacttgctaaggttttcgagagttctgtctcccagaccctgtgctaatcgcattgctggattgtctcactaaacctcacctccagcccatggactaggaatgattatgatccctgctgtagtggaacggctcagagaggataggacattggcccaaggccccccagcttggatgtgctcgagctgggatttagatagtctggtgccaatgcttatcctcttgtcttttttatttttttgagatggagtcttgctctgttgcccaggctggagtgcagtagtgccatcttggctcactgcaacctctgcctcccgggttcaagtgattcttctgcctcagcctctcaagtagcttggattacaggcacctgccaccacacctggctaatttttttgtatttttagtagagacggggtttcgccatgtttgtcaggctggtctcgaacccctgatctcaggtgatcctcccacctcggcctcccaaagtgctgggattacaggtgagagccaccacacccggctgtgtacccttgtctttaacgcacactccatggtgtatatttatccatccagggagccagtgtttgctgagcacccactaattgactaatatatgcaaagcccttggaaaagtgcctggcacacaatagcagtatgctaagtgttacatattattattatcatcatcattattatttactatgctccagacattgatcctgtgtaggcactgggaattcagaagggagcaaaacagaccaaaacccctcccaaaggaaaagcttgcttttgagttaggggaattaacaacaaaattaatgagtaaaacatacagtatgccagggataagggctagagagaaaatgaagcagagaagcaggcgattgggggtgctggctggttagggctgcagtttaaactgggatggtcagggaaggccttcttggctttttagccctagcctgaaggaggtgagagaatgaggcatgtggatacctggggaggtgcatcccaggtgaatcggcagctccctgatttgatcttgttgcattgggttgccctgcagaaagaccatgtcactaaactgtccctcctgctcaggatgacggtcccctgggcttcctcctcagcatgaagcttcaggctgctctgtctccagcccctgcccctggccagcccatgcagccgtctgcctctctggcattgggagtcccattcctcaaacttctggaagctgtcatggtgccccagtgtttctagtgcacaagcaggggctgccccccagatacagtgggtgtggctttttttttttttttagatggagtcttactctgtcacccaggctgaaatgcaatgccacaatctctgctcactgtaacctccgcctcccaggttcaagtgattcttgtgcctcagcctcctgagtagctgggattacaggcacacaccaccacgcctggctgattttttgtatttttagtagagacggggtgtcaccatgttggctaggctggtctcgaactcctgacctcagatgatccgcctgccttggcatcccaaagtgctgggattacaggcgtgagccacccacctggccagatgtggcttttttcctcccttctaatgaagatgaccctggccttgagtgacagagtctggacaagatgttaaggggcatgttttttggcagagtgcacacccacatgggcagatttgccttgggtgtgagtcatcgataggttctagggaagccaattctggaaaagctgcagacaggccccgtaaagatatgggagggggaccgggcacagtggctcacccctgtaatcccagcactttgggaggccgaggtgggcagatcacctgaggtcaggagttcgagacctgcttggccaacatggtgaaaccctgtctccactaaaaatacaaaaatcagccgggccttgtcgcacacacctgtaatcccagctactgtaatcccagctacttgtcgcacacacctgtaatcccagaggcaggagaattgcttgaacccaggaagcggaggttgcagtgagccgagattgcgccactgcactccagcgtgggcaatagagcaagacttcgtctcaaaaaaaataataataaaaataaaaataaaaaaagaaatggcagggggagtgggaggagaccagggggaggaagaaagtggaacggggttgggggtggtggagaaacaggcagctgtcagttccagtctccaacctgggaaggatatggggtaggaacaggctccgtaggagcagggtccctgcccctcagtgtcctcctcctagctctgcttcaattctctctcacctgcattatctacgtaccaagcgcaggaatgccatgttctcaattttaccatattcgtgtgccacctggaccattactgattttgtatttctatttaaactgagtcacctaaaaatttcaaaaaataggccgagtgcagtggctcatacttgtaatcccggcactttaggaggccagtgtgggaggatcacttgaggcccagagttcaagactagcctgggcaacttggggagacccagtctctacaaaaaaatacaaaaactagccaagcatggtggtgtacgtctgtagtcctagctactcaggaggctgaggtgggaggatcacttgaggcctggaaggtcgaggctgcagtgaggagaaattgagccactgcactccagcctgggtgacagagaacctgtgttaaaaagaaaaagaaaattaaaaaaataataatttaaaagagacacagcggagtgcattggttcatgcctataatcccagaactttgggaggctgaggcaggaggatggcttgaggctaggagttcaagaccagcctgggcaacatagcaagaccccatctctacaaaaaattagccaggcatggtggcacacacttgtaatgccagctacataggagactgggttgggaacatcacctgagcccaggagttctaggctgcagtgagatatgatagtgccactgcactccagcctaggcaacatagtgagatccaatttctacaaacaaaataaaaataaatagccaggtatggtggcatgcacctgtagtaccagttactcaggtggctgaggcagaaggatcacttgagcccgggagtttaaggttgcagtgagccatgatcatgccattgcactccagcctgggcaacagagagagaacttgtctctaaaaataaaattaaaaatgaaaataaaagagaaacttcaggtctcttcaataaatgcaaaaccatcagcacttgctgtaagcagagggtagctagaaaataaatataagggaagcagagccaaccattcaaatgcagtctgagcctgtggcctgcagaaactgctcaatgctgaagctgctctttgtgaaccatgcaagatggccaagggctagagagacaaagataggctggcaccacgtggggcctcatgcctggaaatggtcagcaggtttgaaagagaattgacaaggaggtaactgtctcatttctcttatctaaaaaccaggggatgcaggcagggcgtggtggctcatgcctgtaatcccagcactttgggaggccgagataggcggatcactcgaggccgggagttcgagaccagcctggccaacatggcaaaaccctgtctctactaacaaaaataaataaataaatacaaaaatcagccagatgtggtagcacatgcctgtgtcccagctactcaggaggctgaggcaggagaatcacttgaccctgggaggcggaggttgcagtgagccgagatcactccactgcattccagcctgggtaacacagcaagactctgtctcaaaaaaaaaaatgataaataaaaataaaagccagggaatgttgctagaaccttctgcataggattggtttggttctataatgagatgattcatgtaagagtcttggcgcaggacctggcctggagtaaactcttgataaatggttgtgtgtgcctgtgcccttgttcctctgcttacacaggaattccaggagaactgacatggtgcctttttttgtggccctgtcccccacccatgtgctgtacatcaaaggcatttaataaatatttttaacaggaggtgggagggacttgagttctgtgatgctgacagtgaccatttgtctcacttgtagccagtactcgtatgtgctcaacaagtgattgttgtgtaaaaaagcaaacaacagagtgtaaagtccagcagaatgtccactccacaaggacagggttttccagctgttgtggttactcggatccactgcctagaacagtgcttggcactaagtaggtgctcaacgaacatttgttgcactgacatatgaatcaatgactctgtggatgaatgaatgaatgaagaaaagattgagcttatgaatgagtattagctcttcctttcccagacccaggagacaggccttttgtaaagtttcaggtccccatcacaggctgactgagccctaagcatggtgaccaggaaatggagaaagtgaacaaagaaagagacaaggtgggctcaggtctctggcctgaggcatctctagatttccctagcaacagcacctactggtggaggggagcatcctgggagctgccctggatgggctcagggtggggccaggaaggcgcgtaccacaggtggctgctgctttttttttttttttttgagacagggtcccactctgtcacccaggctggggtgcagtggcgtcatcacagctcactgcagcctcgacatcccaggcttaagcgatcctcctgcctcagcctcctgagtagctgggaccgccggtgtgcaccaccacgcccggcttatttttttttaaattttttgtagagacagggtctcaccatgctacccaagctggtcgaattcctggactcaagcaatctgcctgcctcagcctcccaaagtgctgggaccacagttgtcagccaccgcgcccagcccactggcagcttcttatcacccgctgaaccctcagtaatgtcccgtccaccccagcaataggctcttcaagtagggacgcctagatggtaggggctgttttccatgacagggcaaacactgggcaaagtggcaccaaggagcatttttcatctatataaggctttattttcttctgcgctgggctgaagtggtgcattctaagggttgtacatcccacccactgcccccacaaaggggaggtttctgaagaaaatccccagggcttccaagagaggtgttgccgcattgagtgtttatatgccactcacattctgggcacagaacattcttatgggataatgtttaaccagcgtgtgggctgagttgctgtggctcacagaggaccaggtgaagggctggcctccttcctaggtgggctctggaggaggctgggcctccttgccctcccataacccagcttctcgtcttgactccaccagtaggaaacaggcatccttttgtcctctttagggagcaaactgctatctatttttcctggattttttcttaagctaatacagaagccaggactttgattctttgaaaaaaaaaattctgttttaagcaatttcttggtgcccataggttatgggcccaacctcattcagtcattccttgcatattaagatgtgtgaatgttttacagcttatgagaaaggaaaaaaagcaaagtgactgtaaaatccttgaaggcagggactgggtgttatacttgcaatcccacctcattcaggagcaatttactgtgtaatcagttttcccctatcttaaaatccgagatgggcaggattctataatttgtagggcaggttgttcccaaatttgagtgtgcacaagagtcactggggggaagctggttaaaaatctagatttccagatcccactgtgattcattcattcaattgatgtttattgagctactaccataagtagggtttccagatttagcaaagacaaatacaggatgtccatttaaacttgaatgtcagatcaacaaatttttttttttttttgagacagagtcttactctgttggccaggctagaatgcagtacagtgttgtgatcatagctgagtgcgacctcgaccttctgggctcaagcaatccttcctcagcctcccaagtagctgggattacagatgtgcactatatgcctggccagtttttcttttttttctgtagagatggggtctcactatattgcccaggctggtctcaaactccttggctcaagcgatcctcccacctcagtgccccgcaaagtgctggaattacaggcactaagacactatggccagccaacaaattattatattttttaaattttatttagtttttgagacagagtttcactcttgttgcccagtcttgcagtccagtgcaatggtgtgatcttggctccctgcaacctccgcctcccaggttcaagcgattttcctgtctcagcctcccagtagctggaattacaggtgcttgccaccatgtctggccaatttttgtatttttagcagagatgggattttaccatgttggccaggctggttttgaactcctctcctcaggtgatctgcctgctttggcctcccaaagtgctgggattacaggcgtgagccactgtgcctggccaaattattattatataggatcttgctctgctgcccaggctggagtgcagtggtgcatcacggctcactgcagccttcacctcctggggtcaggcagtcctcccacctcagcctcctgagtagctgggaccacaggtgcaaaccaccacacctgactaatttttttgtattttttgtagagatgggttttcactatgttgcccaggctggtctcgaactcctgggctcaagcaatcctcccacctcagcctctcaaagtgtttaggattataggtgtgagccattgtgcctgacctacaaatcatgttttaacatcagtatgtctcatgcaataactgggggggcttgcctccttgcattcatgctactataaccaagtaccaccataggctaggtggtttgtaaacatcaaaatttatttctcacagttctggaggctaaaagtccaaggtcagggtgccagcatgatcgggttctggtgagggccctcttccgggttgtagacagcctttgtatttcttcacctggcagaaagagagtaaagtagcctcttcttataaaggcactaatcccattcatgagagctccacctcatcacctaatcgcctctcagaggccccacctccagcacactgggacagattaagctttcaatataggaattttgggggaacacagacattcaggcagtccattacagaacatacacgagaaagtgctttgttgtttatatgaaattcaaatttaactgggagtcctatagtttaactggtaaccctaatgctgcaccaaacactgttctaggcgataggagaacagtgtgaacaaaacacagcccctgatttctgatagcttatgttatagtcaggaagccatttcctggtgcccccatagggtctggagacaaactgattcatgcagacaaatagatccaggaagaaagggggaagccaggtgaggggtgcagtgatggaggtggctgtccgttttgaatagagtagacagggaagctctttctttggaggtgacatttaagcaaggacctggagaggtgagatttggatgcagtaagtgtgtagggctcaaggatctgcatagataataagccattctggaagaatccgatgtggggatctgcgaacgccactttgagaaaaatgactttagggtttcaagcctcatgtccacctctgatgatgcacttagctgtttacagctcctctctgggcctcagttgacttcatatgtgcaatgggaatagtagtcactgactcactttctcacagggcagttgtgggtatcaaatgacgtaaaagatgggaaaggactttgtaaactgaaaaacgctcagcagggtctcgactagtgccatccattagaaatacagtgcaagccccttgtgtaactttaaagtgtctagtagctgcttgaaaaagcgaaaaatgtgaaattgattttatgttattttatttattttttgaggcagagttttgctcttgttgcccagtctggagtgcgatggtgcgacctcggttcactgcaacctcctcctcccgggttcaagcaattctcctgcctcagcctcccgcgtagttgggattacaggcgcctgccaccacatctggctaattttttttctatttttagtagagacgggggtctcactatgtggcccaggctggtctggaacttctgacctcaggtgatccacctgtcttggcctcccaaagtgctggtaaaacaggcgtgagccaccccgcccggcgtgaaattgattttaataatatgttttatgtaatgcataatactttgataataatataccaaagtgttatttttacatgttgtcaatataaaaattattgcagagatattttataacatttttcttgtgctaagtcttcaaaatctggtgcatgttacgtgcttacttacggctcatctcaatttgcactagccacattcaagggcttaacagccatatgtggccctcggcctcatgttggacagcacaggctatagcatgaatagtatgtgaagagctggcctcattgttttaaaacacagtgtattagtggaaattttgaggtataatcatacagtaaatttttttatatttatattttactttttttttttttaagagacggagtctcgctctgtcgcccagcctgcagtgcaatggtgccatcacagctcactagagcctcaaactcataggctcaagccatcctctcacctcagccttctgactagctaggactatagacatcagctaccaggcccagaaaattttttttttttttagagatggggtctcactgtgttgcccaggctggtctcaaactcctggcgtcaagtgattctcctgcctcggcatcccaaagtgctgggattacaggcatgagccaccatgcccagcctttgttttattttttaaattgacacagtaattgtgcgtatgttttgacgcacaccatgtgtagtgatcagggtaacttgcatttccgtcatctcaaacatcatttctttgtgttgggaacatccactatccgccttctagctatttggaacttatgtttcagtcatcctacagtggcataaaacactggaacttattcctcccacctcgctgtaactttgtatcctttaagaactcactctctatcccccaccctttcccttccccttcccagcctgtagtatcctctgttctactgtttacttctatgagatcaacactttagcttctgcatatgagtgagagcatgtggtgtttaactttctgcccctggtttacttctaaggtggaatattgaacagtaaagtgaaacagaccagtgacacaacaatgtgaatgattcttacaataggctaagtaaaagaagccagactaagggcaacagatcaacagatgatcaccatcagaaagatagttcccaagaagagggggcattccacaccacaggggtccacagggggagcactggggtggctcaggaaggagggagggagggggagaaacgtgggcaggagcctttgttatggtttccatgggaaggacagggtggggcagggtaagaggcttaggaatggctaatgaggatcatttcagtgggctctgggggagagggactgtccctagttgaatagtacctggcctggggtgattagagcaggtgtactgtggcctggtggacagtgaatgcccagtaaaggaggtggttggactatgggctctaggttggttgctttgcatttgaagagtgtgctccagggtgacttgtctgcttatcgctaggttatcactggctaaccctgggagggctagtgcctctagggtcagcaaggcctcagatatcaaagctctagaacacaaaagataagacatgtgtcatgtactcatactgcaagagatttggccaggggcacggcacagcgatccagattggtttgggtgaatatcagtagctctgtcatgtctcagccctgccagcctgcggccagccccttagcttttaacaggaagagagatttcaaggaattgcctgaactgagcttcttcagagcttgtcgctctctgcgactgttctttggagctagtctcgtgctagaagttgtgaaggctttgcctaattccagttgagatgttcaagggacaggatccctttctcctcctttcatgtgattatttatttattagacagtgtctcactctgtcacccaggctggggtgcagtggcgtgatctcagttcactgcagcctcaacctctcatgctcaggtgatgctcctgcctcagcctcccttgtagctgggactacaggcgcgcatcaccatgcctggctaattttgtctatttttcgtggagacaaggtctcactatgttgccccagtctggtctcaaactcctggactcaagtgatcctcccacctcatcctcccaaagtgctgcaattataggcatgagctaccacgccaggcctctatgtgatattactgcccaactccaaacatggtagggtctggggaatttaggggtttctagtgcctgcttataatcacctaagtgtattgggagatgaggagtggtattttcctctcccttggaaataccaggcccctcttggctgtaacgtctcagtggctggtgcttggggaccatgggaggagagtgtggggataggagcctctttcggttaatatcatctctgatgctcacccctcaggccccaccacaacctgcctgtccacctgtaccacctgggctaatccacatgcttctctgaagacttgctcttcaaagagacaagcacaatgcaaattaaaaccataatataccactacatgttcatgagaatggctgaaattaaaaagactgaccacactaagtgttgacgaaggtggggagcaactggcagtcgtgaatactgctggtgggaatgaaaacaagaaacctgggggaaaactttgacagtttctaaaaaagtgaaacattgacctattctatgatccagctattccactcctaggcatttacccaaaagaaataaagtatacatctccccaaagactcagatacaaatattcatagcagctcttatttgtaatagccccaaagtggaaacaacccacatgtccatgaacaggtggctagatgaaaattgtggtctagctatatggtggaatattgtgcaatgaaatgaaacagatcattgatacacacaacaacatgaataattctcaaaataattatgctgagtgaagaagccagaaccccctccctccaaaaacaaatatatatatactgtcagattctgatgctagaaaggcaaactaatgcaccgtgacagaagtgtttatctatgatcagtggttgcctagggtaggcggaggcaggagagatggattgtaaagcggtatacagaaacctttgggagtgatggattcattcactatcttgattatggtgatgatttcatgggtatatacataagtcaaacctcagctaattgtaaacattaaacgtgtaatttattgtatatcaactatgcctcaacaaagctgtaaagcttaaaaaaatctattttttaaaaagtcacgtacagaccagtcatggcggctcacatgcctgtattctcagtgcttcaagaggttgaggcggcaggatcactttaggtcaggagtttgagaccagcctgggcaacagaaagttagctgagtgtggtggcaggcacctgtagtcccagctactgaggaagctgaggtgagaggatcactggagcccgggaggcagaggttgcagtgagccatgatcctgccactgctcttcaatctgagcaacagagaccctgtcacacggaggaggaggaggggaagaaagggggaggaggaaggggggaggaggaagacgggaggaggggagagggaaggaaggaaggagaagaaggagaaagaaaaaggaggaggaggaggaagagaaagaaggagaaggggaagagaaagactgaggaggaggaagaggaggaagaaaaagaagaaagaagaagcatgcataagctttaggggtgggctggtgggagatcagactgtgaggcagtgccagcctccagtcccaaggcagatctgggagcaggcactaggatgcagatgcagaggggacacagaaggggacaggtgggcctggaccctccccaggagtggctcacactctgattgggggacccaacctaccctgctgtgaaccagtctgtctgaggtgtgttagtggagacacaaacctttgcttatgccagagatgtgatttgtttcaattgggaggatgggatgaggcttcttggaaacaatggtatttcaatgtattggtgtcttatttgaaaaatagactgtgagcactggaatagctgacctctgatgagcacttagtatgtgctagggactcttggaaagctgcacatgcagtattccatttttttcttgtcacacacttgatgggagggcacttttatcacctccatttaaggacatggatgcccaaggtcttataggtataggtcttttaggtatagtggtgataccaagatttggcccctggtggtctaatttccaattcagcactcctattattcccaatctgtctctggtgtgtgagtgtgtggatggagaatatattggaatgtacaactgtttgggttttttgttttttgttttttggagatagggtttttgttttttggactccaggctggagtgcagtggtgcgatcatagctcactgcaaccttgaactcctgggctcaaacagttctccatcctcagcctcccaagtagctgggactacaaacgtgcaccaccatgcctggctaacttttaaaattattttgtagagataaggtcttgctctgttggccaggctggtctcaaactcctgggctcaagtgattccaccactttggcctcccaaaatgttgggattacaggtgtgagccactgcacccaaacttgagtatgatttgaaggtgcctttgggacccttatgttgtaaatcattgtcacttatcactagtctaaaatggaaaaggtagacggtattgaacaaatgttgaattaattacccccatcacttgcagatagtactttttgttttacatcatagtcttgtctgtctctttccccagacttccatggttttgatgatgaatctttcaagtaaggcttcactggttgtttctttgaattatcctcttcattaattatggtgaacagggtagaaatggtcaaagatgttgactcactgtggtcttgtataaggtagcagtcacattcacaaagcagatgcccttgtatggaacagcaggtgcatctctagcaggtgaccccatgaagatgttcctggtggagctgatgaatagcttctttaggtggtatggagtgtctgggcaaatgaaatcgaactcttcatgatcatgagttgcactggcacatccttctgatcattgaaggccatcatggcaggacatcactgcctcatttctaggcttctcagggactgagcacatgcaacctcaccattgtgtcctgctgagtctgggaaggggtgtcaagacagcctgtcctcaaagggccttgtcgcagaagagggacaccgtgaccagcagaactgctcacaggtcaagggccactgggtgacaatagggtagagagtggatgtttcagtcacggtcaggtgacatcgtttagtgccagtgtctcagttccgggtgtttgtggttggccaagtgcaaggacagcttccttctggaataaatgcataggcttttgagcccattctttgttcattctctcgttcttttattttttgttgtggaaagtttcaaacacacagaagtagagagaatcatataaaagactcccaccaggtgctgtgggtcacacctgtaatcccagcactttgggaggttgaggcatgatggttgcttgagcccaggagtttgagaccagtctgagcaacatagcaagccccaatctcttgaaaaaaattaaacaattagccaggtgtggtggtgtgtgactgtaatccctgttacttgccaggctgaggcgggaagatcatttgagccctggaggtcgaggctgtggtaagctgcgattgcgcaactgcactccagcctgagtgtcagagcaagaccctgtctcaaaaaaatgaaataaatgaaagactttcatgtacccaacacaaatgttgacatttcaccactcgcgtcttgtatttgactttttctgattttcattgtattttctgttgaggcatcacagtcagtaaagcttacagcttgatggattttgaagatgaattttcatctatgtttatatctgtgaaaccttcagatcaagatgtagaacattctcagaccttagcaggctcttgcctgcccctccctgagatctgcactttcataaattgtagggtacaatggtgacatcatattgggaaaaatatcttgacagataaaaagttttgtcttccttcttgccttcctttctccctcccttcctctcccctctcccctcctccttcctcctcccctccctcccttcttgcattcttatatccttcccttcttccttctttattcactgatctagttattaagagggtaaactctggattttttttttttttaaagcgggctgggtgtggtggctcatgcgtgtaatcccagcactttgggaggccgaggcaggtggatcccttgaggtcaggagtttgagacaagcctggccaacatggcgaaaccccatctgtactaaaaatacaaaaatcaatcctgggtaacacggtgaaaccccgtctctactaaaaatataaaaaaaaattagccaggcatggtggcaggcacctgtaatcccagctactctggaggctgaggcaggagaatggcgtgaaccccggaggcggagtttgcagtgagccgaaatcgcaccactgcacgccagccctggtgacagagcgagactccgtcaaaaaaaaaaaaaaaaaatcagccaggtgaggcagcaggtgcctgtaatcccagctacttgggagactgaggcaggagaatcacttgaacttggggggcggagtttgcagtgagcccagatcacagcactgcactccagcctgggcgacagagcgagactccctgtcaaaataataataataataataatggaaaatacatacagatccagagtttactttcttagtaattaagaaggtaattactaagaaggtaaactctgagtctgtttgaatacacacacacacacacacacacacacacacacacacgtatgtatgtatatatgaaaaaacccagatgaagtgaaactggcttagagattggcttagagattatttcagattaacagtctctgtcaatctgaaaggcctgccttcctccttcccttcctctccctcttcttctccctcactcccttactttgctttcttcctgctgagcactgattggcaactctaatggctattggaggttcagaacaaaaccaaccatgatactggcccgtcttccatgtccacagtgccccggtgacaagaggatacctgaagcggcttctcagggtttctaaccctttttttttttttgagacaaagtctcgctcttgtcccccaggctggagtgcggtggcacaatctcagctcactgcaacctccgcctcccgggttcaagcgattctcctgcctcggtcccccgagtagctgggattacaggcgcctgccaccacgcccggctaatttttgtttttttagtagagacggggtttcaccacgttggccaggctgatctagaacccctgacctcaggtgatccacccatctcggcctcccaaagtgctgggattacaggcatgagccaccgcgcccagcctcaaggtttcttaggaagggtgagcttcctgccctaaaggtgctcaaggccggggaaggagtatcttaagtgcctggctggaggctgacctagctgacttgctccccccaggcccccagtcagaggaggtcagaagggcctggtgggtggtgacacctgtgtgttccctcgcagacgctgcaggagatcttccaggccgagaacaccatcatgctgctggaaaggtccatcatggccaaggagggcccgctgaaggtggcccagacaaggctggagtgccggacccggcgccccaacatggagctgtgcagggacatcccgcagttgaagtaagtgagggaggccagaggaggcaggagaacccctgggaatccaggaacgggaaggggtgagtctcaggagcttctaggtgcactgggtctgaaaaatggaccctccttcaatcaggacatccagtcccacaactcagtagagtgcagggtgtgggtggagttctgagatgcagctcgggctgtaccactgcgtggcttcctcatcactgggagccccaccctgtgcactgtggtcttctcacttgcctaaactaggggtggttttgtaactctgttgtgctctagaaaccctcttgtttcacttgaaagccaaggcaatgaatggtcgcctcccaggtggtggctttaccttctctctccaggcttccatgaaagaggcacccattcctcactcatttcccacctccctttttgtaaagttcttaccatgaagccctggaagagcctcatgagctcctggctggtggatcccacccatcctgctgtgctaaagaggctggtgtctgttgacgaagggctttctcacaggacaggggtcaaaagctcatgccagcccagaaaggaggtttgtggggggtggggggtggggattgtaataggatgatggccaggccaagaaggaacaggtcatcagatatggggattatttcccatgaacgtgctgtatgacttggggcaaaccacttggccactctgttctccccatgctaggggcattatcttagttgtctattgctgtgtaataaagtaccccaaaaggtagtgacttgaaagaaccacatttgttatctcagtttccgtgggttaggaattgggctaggttccttgctatgttgtacatgtcagggtcttccgcaggttgcaatcaagctgtcagctggggctgtggtcttatctcaaggctggactggggaaggttccacatccaagctcactcccatgcttgttggtagaactcagttctttgctggctgttggctggcagccaccctcattcacccatgggtctctccagcatggtggcttgcttcaacaaagcatgcaaaccagaaggacaatgacagtaccagccacaaggatgtcacagtcttttgtaacctaaccatggaagtgacagtccatcactctttctgcatgctcttctttagaagcatctctaggtccacactcaaggatgtgatgccaggaggaccccacatcattgagggtcatccttggagcatcctcctatgggcactaacagggtttccggtggagggggaagagactgagtctggccccatttcagctgctcatttgctccataaaccttattctgcattcactgtgcccagggctgtgctcaccgggtttcatagcagtacttcttttgacaagatactgagttgatatcccccaagagaaaaagattgaaaggaccatcctcaggcttccttgggcatattatttcagccctagcctacagcaagggaagttcaccctgatggctaactgcaatcccttgaacttcttttgagttctttgccctttagtctcactcctaggggagttgggaagtcagttactcctactgttgtcaaatgggaagataaattgaggtccagagaggttgaaaaagctgtcccagtcacacagcactaagccagggcttcactgggcagggagcacaggtcttggtccagcgatggaccctgctccctccatcctggtgtggagaccccactgctagatgtgaaaagatgtcaagaagagagctatcagttaggagaaggaggatagataatcaagaaaaagtgttgggtggtgcccaagcgatgatttttgcacagcctcagttaccgcctgagtaaccatttaggaaatggaaaaagcaggttatgtgttggggtggggtggaggggcaggcaaattgatccaaggctttgaacttgagggtctggggtccctcccactttggaaggccgaggcaggaggatcacttgaggccaggagtttgagaccagcctggacaacacagcaagacactatctctaaaaaataaaatacaaaacttagccaggcatcgtgacatgtacctgtagtcccagctactcaggaggctgaggcagaaggattgcttaagcccaggagttggaggctgcagtgagctatgattgcgccattgcactccatcctgggcaacagagcaacacccagcagacctgctgctggcttgctaggtcttcagccctggaagtgagatggatagggtctaggtcctgggtgcaggagagtgggggctgggctctgctgacctctcttccctctgcccctgcttcttcgatgctcaggctgaaccccagtacctcctgaagtggagggctcaggtgatccctttgcctccccaacgagagtttttttttaattgagtcttgctctgttgcccaggctggagtgcagtggcacgatcttggctcactgcaacctccacctcccgggttcaagagattctcctgcctcagcctcccgagtagctgggattacactcgcctgccaccatgctcggctaatttttgtattgttagtagagtcagggtttcaccatgttggtcaggctggtctcaaactcctaacctcaagtgatccagccaccttggcctcccaaagtgctgggattacaggcatgagccacagtggcggccccgccaggggacttctacagaacagggcttctgggggagttgcctggaggacctactgctttggggcaagctctctgccttcccgtttcccgttcaacagtcataccactgaggaggacagacagaaagcaaggaggtggagcatgtttggttcaggagccgggccgtgtgtgtgtgtgtgtgtgtgtgtgtgtgtgtgtgtgtgtgtgtctgcatctgtgtatgttgtgttttggtttgtatgcatggctgtcttcggaattgagcagatgataggattcaggctgtctcccttctccagtggctaaattgtcccatctgtgcatgatcttccttgtccccgtcctctccattcctgcctttgggccatctttttccttttcctcctataagtggtctctcttctcctgacctactccaatcactagggtcccatccatgcctatcccccagaaagaaagtccatttaaaattgaactttaaaggctaggtgtggtggttcagacctgtaaccccagcactttgggaggctgaggtgggaggatcacatgaggccaggagttcgagatgagcctggacaacatagcaagaccccatctctacaaaaaatacaaaaattagccaggcatggtggcatgcctatagtccaagctacttaggaggctaaagcaggaagattgcttaagcacagaagttggaggctgcagtgagctataatcgtgccactgtactccatcctggggaacaatgcaacaccctgtcaaaaaaaaaaccataaactgaattttaatgaaaattaaataaagttaaaaattcaattccttattcacaataaccacatttcaagggctcagtatccacatgtggctagggttcaccatatcagacaacatagcacagaatatctcccttgctctagaaagttctattggacagagctggtggaagtttccaggctgcttctgtcacttctctttgcttctctctagcccaggcttcccatggggaagttcacccagcttcatgtcctctggtcctgagcacagtttcactgtctcttctccccagaggtgggacccgcagcacagtcccacaaccaagccaccatcacagctcaccttgccgcattcatttcccagggctgctatcacaaattactacaaactgggtggctacagacaacagaagtttattccctcacagctttgggggccagaagtcccaaatcaaggttgctgttcctggaggctctgagagaggctctgttcccttccactctcccagctccggagggctgtcagcaatccttggcgtccctcagcttgtagccgcatcgctcccatctctgccttcgtctccacatggccttctctcctgcatgtctccatgtctcaaacctccctctcctttctcttatcaggagatcagtcattggatttaggtgtcaccctaaatccaggatgatctcatcttaagatcctaaacttcattacagctgcaaagaccctatttcctaataacattacacgcaccagggcttaggacttgaacatatctttctgaggaacaccacccgatccgctccatgtggattcacaataacctcctaacctttctcctgcctctactcttgcccccttccaatctcatcttacacagcagcctggaggttatcccgaaactcgagtcagcatgccattcccctgtttcaaccctcccccgcccccaccccatggcttcccacagcactgagaacaaacccaagccctttaattttgcatgtgcttttctctctctctctctctcttttttttttttttttttgagatggagtcttgctctgttgtccaggctggagtgtaatggtatgatctcatcacactgcgacctctgcctcccgggttcaagcaattctcctgcctcagcctcccgagtatctgggattacaggcacctgccaccacacttcgctaatttttgtgtgtgtgtgtgtgtgtatatatatatatatggacatagatatagatatatttttagtagggactgcgtttcaccatgttggccaggctggtctcaaactctctacctcaagtgatctgccacttcagcctcccaaagtgctgggatgacaggctgcaacctctgcctcctgggtcagcctcccaaatagctgtgattacaggtgtgcaccatgacacctggctaatttttttctatttttagtggagacggcattttgccaccatgttgaccaggctggtctcgaacccctgacctcaagtgatctgcccgcctcagcctcccaaagtgctgggattacaagtgtgagtcaccacgcctagccaaaatttaagttttaaattaatacagctaaaattcaggttctcaattgcatggccacattcaagtgttcattagccccatggggctggtgggtaccatatttgatggtgcagatatagatctttccatttttgcagaaagttctactccacggcactgctgcaacatactttccctcttggccttcaacatgtccagctaagtcttatctttcttctctgctcaaagtcctctcctgggaggcggagggaggaggatcacttaagcccaggagtttgagaccaacctggaggcaaaaaaataaaccccatctctataaaaacttttttttttaattagccaggtgtggtggtgcctgcctgtagcctcagctatttgggaggctgagacaggaggatctcttgaacccagaggtttgaggctgcagtaagctatggtggcaccactacactccagcctaggtgacagagggagatctggtctaaaaaaaaaaaaattaaaatcagctgggtgcggtggctcatgcctgtaatctcagcattttgggaggctgagttgtgcagattgcttgagcccgggagtttgagaccagcctgggcaacatggtgaaaccctgtctctacaaaacattaaaattagcctagtgcagttttgcacgcctgtagacccaggtacttgggaggctgaggctggaggaacgcttaagccaaggaagttgaggctgcagtgagctttgactgcaccactgcactctggcctagacagagtgagactctgtctcaaaaagaaaaaagaaaaaaagtcctcccctcggaaagttctagataagcaaagcctcagaaggagaggggtgaggaagtagtacggggcagcccagtcccagctgatcctgcaaggggcgccagaccttgaagtgcatcacagagatgtctgcaccagaggccctttgtacctgagtcagccaagccattgtctgtggccgctggcagggactatcctcccaggtgagatagctcagattggctgagcaacttaattgcctggagaactgcggacctgtgagccattagcagccaacactcactcgtagcagctggggatggtgccctggccagtaaggaagacctgagtgaggctcttatctagacaaggctggccctgttatcctgtttattaaaaaattatagggccaggcgtggtggctcatgcctgtaatcccagcactttgggaggctgagactggcggattgcctgagcttaggagttcgagaccagcctgagcaacatggtgaaacactgtctctactaaaacatgaaaaattagctgggtgtggcggcacgtgcctgtaatcccagctacttgggacgctgaggcaagagaattgcttgaacccgggaggcagaggttgccgtgagccgagattgcaccactgcactccagcctggatgacagggcgagactccatctcaaaaaaaaaaaaaaattgtgataaaatacatgtaacacaaaatttaccatcagtgacatctggtacattcacgatgttgtgcaaccctcaccactctctagttctgtgatgttttcatcaacccaaaaggaaaccccgtacccattaagcaatcttctacattctccccaccgcctgacctctggaagccaccagttaactttctgtccgtatggctttgcctcttctggacatttcctgtgcatgcagtcacgcaatatttgtccttttgtgtctggcttcctttatttagcatcatgtttttcaaggttcattcatgttgttgcaggtattagtatttcattcctttttttttttttttttgagacagagtttcgctcaggctcccaggctggagtgcaatgatgtgatctcagctcactgcaacctctgactcccgggttcaagagcttctcccacctcagcctctcgagtagctgggattacaggcacccaccatcatgcctggctaactttttgtattttcagtagagatggggtttcaccatgttggccaggctggtcctgaactcctgacctcaggtgatccacctgtctcagcctcccaaagtgctgggatttcaggcgtgagccaccatacccagctgtatttcattcctttttattatagctgaataatctcccattctgtggctcgattacattgtgcttatccactcatccatccatccacagacatttgagctgcttccaccttttggttatcgtgaatagggctgccgtgaacattcatgtacatattttggtttgaacgcctgttttctgttcttttgggtatatacccgggagcggaactgctggactgtgtggtaagtctatgtctaacttatcgaggaatctccagattggtctcctatcctgttttaccatcctgtcttatttcttcctttgtgtacattacccttgacagttctcttgtgtatttacttgtctacctgttctgcctctgccttcccctggagggccgagccttgcctgtcttgcttgctgctgtctctcagtgccaggcacagttcccagtgcacagtgagtgcatctaccttgaaccgaataacctgtgctaggtcgggcaccatagctcatgcttgtaatcccggcactttgggaggccaaggcaagtggatcaactgaggtcaggagttcttgaccagcttgaccagcatggtgaaaccctgcctctaataaaaaaaaaaatacaaaaattagctgggtgttgtggtgcatgcccgtaatcccagctactcgggaggctgaggcagaattacttgaacccgggaggcagaggttgcagtgagccgagattgtgccactgcactccagcctgggtgacagagtgagactctgtctcaaaaaataaacaaataaaaataaatgaataacctgtgccttctcctctgccctcaccccaggctggtgaacgaggtgttcaccatcgacgacaccctgcagaccctcaagctgcggctgcgggagacacaggacacgctgcagctgctggtcatgaccaagtgccggctggagcacgagctcgccatcaaggccaacaccctctgcatcgacaaggagaagtgcatgggcatgcgtaagaccttcccctgcaccccgcgcctggtgggccacacctgagcaccgccctggcgcctcattccgcgctggcgtaaaattggaaaaggctgagaaacaaagtaaaacagtattttgtttg

SEQ ID NO: 64 - DNA, 67442 bp, Homo sapiens
  allele (1)..(67442): TEKT Variant Allele (rs2541508)
actttcacctttcctggtgatgcctttggctccttgagctgagttttgcccgagtggggctcatgagggaggatggagtttcttgggactactcagaccgccagttactgtggtcccaagaaatgctgtggcttgacctcactgccagctgtacaggcgccagtgatccaggaatgctatcagccctactacctgcccgggtaccgctacctcaattcatggaggcctagcctcttctacaagatagccaacgtccagacctgcccggacgagagcaccagtaccctgcggccgcccaccatcctgcccacactgcgctccgcactcttctctcgctatagcccccacgactgggaccagtccaaccagctgcaggtgcgtggggccgaggcctcccggctgtgggccagccggctgacggatgactccatgaggctcttgcaggacaaggaccagctgacgcaccagatgcaggagggcacctgccggaacctgggccagaggctgtcggacattggcttctggaagtcagagctgagctatgagctggacaggcttctgactgagaaccagaacttggagacggtcaagaggcggctggagtgcgcggccaatgaggtgaactgcccattgcaggtgagtacaggggtggggacagggctgtggctgtgtcctggggatactgcacgctcattctgcttcccttgactgaagatgaaggtggcaggcaccttgcaggtcggtttgagctgcatcatcgaatacgatcagtaatacaatcttagtcaattcaggataatcccagtcaaatcagggtttcttggactgaatagaatttccttttctccttgaagctacatcaaagttgcaggggtttcatgaaaatattgtgtgcatacttatgcatgcctgagcatgtgtgtgttctggtccttaaagcacatgcttaaaataactgacttatttatttattttttacacagagtctccctctgtcacccaagctggagtgcagtggctcgatcttggctcgctgcgacttccgcctcctgggttcaagcgactctcgtgcctcagcctcctgaggagctgggattacaggtgcccgccaccatggccagctaatttttgtatttttagtgaagacagggttttgctatgttggccaggctggtctcgatctgatcttcccgccttgacctcctagagtgctgggattgcaggcatgggccactgtgcctggcccataactgccttatttttccccgtaatacttatcatttaacatgctctatacttgattgaatattagaatacagtatagtctccatcaaggtagagatttttgcctgctttgtcactgatgtattcaagactgctattcagtgcagggcacctgtatgtctgtgtgggtccgtagtgaccaatgtcggtgctgactggtattgtttacactaatgttttgaatgtattcccagcctaggacagggcgaagcacagagtaggcattcaataaatacatgctgaataaatgagtaaatatctaaatgtgactgggcacagtggcttacacctgtaatcccagcactttgtgaggccagggcaggtggatcacctgaggtcaggagtttgagaccagcctggtcaacatgatgaaaccccatttctactaaaaatacaaaattagctgggtatggtggcacatgtctgtaatcccagctacttgggaggctgaagcataagaatctcttgaacccaggaggcggaggttgcagtgagctgagattgcgccactgcactccagcctgtgccacaaagcaagactccatctcaaaaaacaaaacaaacaaacaaacaacaaacaaaaactaaatgtggacattcctaacacttccttggtctcctagcctccagttgtctccctgctcagttaggatagtttttagccgcatgtaacaaatactccacgatagtggtttagccaaacaggaatttatttttctgtcatgaggaaaattccagagggagacagatcaggcggctccagcctcaacttggtgccagaagggacccaggctcctctctctgttctgccacccacagcatgtggtttgtgttctcctgttcccaaggaggttttgcattttatactgcaagttcctgcatgccaggggcctcttgatattctcattcgaggcaggaaggcaagggtagaacaaagagcagaagcatcaatgggcaccattgctttttatcagggaatgtcttttctagaaggtccgtcgtgtgtctccatgtttagcctattagccagcactctcatggaccctggatgcaaaggggtctggataagtgaatgtttctcaccacgtccaggagaaaatcatggaaggggttgagtggacactgggtaaggaaccagcagcacctatgggaactgactttggccacagaggaagatgatcggctgctccctggagtgtgtggggaactcaggacctcttgcctggaagcctcctgcagctacaggggcttccgtaggagagatcctgcctccggatctccctgggagacatggcataggtttctatcactctaggatgtccaaatccatggaatgcagggagcagattctatacaaccccagattctccctgggaagaatgatgggcagggcagcttttcagagccctacagcagtatcccagacctactgctctccctcccattctcttctcactcccccatcctgtctggaaagtccagctttgcctggtcacatttggctttctctgatcagccatgtggtggcagggggaccatcgacatctcaattctatctcctaggctgcccccacaatccaggcagcctctccctgcgcaatgtaagccacctggtctcccaattcctgctcccttccaatccattgtccttacagcagccactggttcccttgatggcctcccagaaattaacaacctttttttttttttttttgagatggactctcgctctgttgcccaggctggagtgcagtggtgcgatctcggctcactgcaagctccgcctcccgggtccacgccattctcctgcctcagcgtcccgagtagctgggactacaggcgcccgccactatgccccgctaatcttttgtagttttagtagagatagggtttcaccgtgttagccagtatggtcttgatctcttgacctcgtgatccgcccacctcagcctcccaaagtgctgggattacaggcgtgagccaccgtgtctggtcccccagaaattaacatcttaattccggaattcctccacccctccccataacccctgtccccgctattgctctagactcgcttcctctattccagggccaatggcttcctgtctgtttctctgctgacctcagggcctttgcacctgctgttttcccttctggtgcattcctgcccagctctgcatctctgcttctcatgacacagtccttctcctccttagagaattcctccctgaccactccgctggttactcctcacccactcacctcaccctgaatattttcctcttggcccttcacacagttggaaatgattgagttcctggtttgttgatgttgtttgagacagggtctttgtctgttgctcaggctggagtgcagtggcatgattttggctcattagttgacctcctggagttaagagatcctccgacctcagcctcctgaggagctgggactataggcatgcaccaccatggctggctaatttaaaattttttgtagagatggggtctcactatgctgcccaggctgagcttaagtaatcctcccaccttggcttcccaaagtgttgagattaaaggcatgaaggaggcgctgtgcccagcctgactgagtttcttatgggtgttctctcccctagtagaacacaggctgtgtgagagcagggactctcagcctggttcgttgtgctatccccagcacctcagcagagcatgtctcacagaaggggctccggaaatccttgtggcacgggtcagtgaccccctcccatttctgagttctcacatacatttgcatcctgacatccagaccttgacatcctgcttccttctgctcctgggccctttgtgacatcacgggctggtttgctaatcactgctgtttgtcagcttcccatcatagagcgcccctgaaaagccccttgtcctgtcctctcttctgctctgcccaggtctgcatgagagttgtaaggcccagggctaggtggcagggttgtcctgaccacttccccaaactgtccctccactgggagatctgcaaagaggggttttcatgcatattcacaggtaatatttaggggcagtgttctcagtgatttacacttgtcaagccgacttcacctgcacaatgaacctgtgagataggcaccaatatggcacccatctgcagaggaggaaaccagcagagaggttaagcagtttgcccaaatgcacacaataggaagtggtcaagccccgattgaagtcagaagagaagctacatggaagatggccgccaacactgtcttatctgaaattattatgaagttttattctatgtattattgtattgtgggaaggcttggggctgctgatgcaattatgggaatcaaaattggttcttgggatgctactttatcctgttttctctacatgggccttgcatctccggatgccttggtcatatgacaacccacagctctcatccggggagaaggggaggcagaagcccatccaatgcccagtagtgaggtcacatgaagcacccaggtttccgggagaaaggaacagattgtggcaagggtggatgtgagtcccttctgctcagggtctacatacagctacaggaagaatacgttctttctgctgcttcccacaggtggccttggagtgtctgtaccatcgagagaagaggattgggattgatttggtccatgacaacgtggagaaaaaccttatccgggtaaggcatctcctggttctgcccagccccctgaaggaggcgggaaggccagcaggtcagagaaattactgagctacctgtcaggagcagaagccacacgtgtcactgtgtggaaagtgagggctcaggaagcatgggtggaggtctagtttgcaatttaggaacagggagtaatggagttatttgaccctcagtcttttcatctccaaaatgggcatgataataatataccaataacaataataaaagctagcgtttattgagcacctactatatgtcataggctgtaccacatcatatgcattatttaatgtaatgataatctataagtgagtgcttggcacatggtaggtgctaaattttcttttattctgggagtctataaaaagaaagtagggcaaaaaaaaaaaaaaaaaaaaaggtggagcctccacaatcaacccttagctgcctggccctggggtcacgtggattgaggcggggccccacgctgacatttcacctcctggggtcgagggtggtcagtgagaggggaggggagagctgagggctctggcctgggagagaagactgtgaggttctaagaggcactgctctttctgacatttttcatttcaggaagtggatttgctaaaatgttgccaagaacagatgagaaaattagctcaaagaattgatatccagatgcggtaagggctttttttttttttaattccctctccttggggtttgttttaggactctcagatttctgggggacaagccagatgggcccacttgtctctgggtggttcttttggtcagtggtatgctggtaaatgttcaacaaccagccttctaggaaaaaaaaaaagagtcctgatcatagtatctgccagtttcgctggtgtaaatgttaccacagtggctgattttaagctgctaatatgatgttactgagatgtgtacaactgactctcacaacccgtgcatcgctggtttctcttgtttacagcgagagccctggccagaggcaactggcctccctgaggcccctcttagcctgtggcttccccatttgagttctgaaccttgggagatgacagagggtgggtggtattaggtagcaaggccaggggctgggcacctccacaagggagctggtggacgcattgagccagaagtcttcaaacaaaatcagctttttgttcttacaagattatgtaaccagtatcccgacaagcctgggggcccctcacataattaaagggagacttaagttttacggggcttggggcccatagtgaagcccttggcaccagctcccccgaaagcagccgcctcacctccacctgcagctggcactcacctttgactctttcagggcacgctgctctgctggtttttccacttcattccctcttgacacagagacacagaaagcacgggacagcctggcaacctggcaatggctgtccctcccgctgcctggtgcacatgggcagttggcgtggatgcagggggggcgggcaccttccaaatcagccctgggagcacatatcttggtttgctgtgccccagaacccacctcctcctctaggagcccttggatcccccgaaggggttagttctgggtgttagggagaaagacatcgcaggcaagctacccatagagcaaagagcttggtcacggacagacacattggagacccctagaaagacatcggggtggaggtgtacagagaagatgcaaatatagcaggagggatgatggctgaaaggacacaaacagagttgaagttcaataatttgtgtgcccctgttctaatttctcacaattccacctatcaccgggactattgttacctatagtttgtctataaattgattcacttaaaaaaaccttaagcacaacagggtgactacagtcaacaataatttattgcacatttaaaaataacttaaagagtataaatgggaatgtttgtaacacaaagaaatgataaatgctggaggggatggataccccagttaccctgatgtgattgttacaaattgcatgcctgtatcaaaatatctcaggtaccccacaaatatatacacctactatgtacccttaaaggcttaaaaaataaaataaaataaataaaaatcaattcagtaaataaaatcccttaaatgttcatatttatttgtttatttatttgtttgagacgaagtctcattctgctgcccagactggagtgcagtggtatgggctcagctcactgcaacctccacctcccagattcatgcgtttctcctgcctcagcctcccgagtagctgggattacaggcccatgccaccacactcagctattttatgtatttttagtagagacagtgttttgccatgttggccaggctggtctggaactcctgacctcaggtgatctgcccacctcaggctcccacagtgctgagtgctgagattataggcatgagtcactgcgcctggcctaaatactcttatttaaacaggcaaattttaacaaagggagaattgggacaggccagtgtctttgttttattgcatttttcttacacttatttttttaattacttattcatttttaattgacaaaagtggtatatgctgtacatataaaacatgatgttctgaaattacgtgtgtatttcaaaacattgaactaattggaactaattaacatatatgttacctcacatacttattttttgtgatgagaacacttaaaagctcagtgattttcaagaacacagtacattgttgttaactatggtcaccatgtctctggaacttattcctcctgacgaactgaaatttgtaccctttgaccaccatctccccaataccccacccccagcctctggtaacaaccattctactctgtgcttttatttgttcgcttgttttagattccacatacatgtgtgatcatgagatatttgtctttctgtgcctgacttattttactttacattatatcctataggcttatccatgttgtcacaaatgacaggattttcttctttttttaaggctgagtagtattctgttgtgtatacatgccaccttttctttatccattcatctgttatgagatacttaggttgatttcgtatcttggctatcgtaaattgtgccgcaataactttgtccattttaaaactgggttgttttcttgctattgagttgtctgagttctttacatattttggatagtaaccccttatcagaggtgtagtttgcaaatatcttctcccatttctgcggttgtctcttcagtctcttgtttgtttcgtttgctgtgcagaagctttttcgtttgatgtaatctcatttgtctatttttgctttgatttcatgtgctattggggtcgttgtccagaccaatgtcatggaacttttcccctatgttttcttctagtagttttacagtttcaggtgttacattttagtctttaatctatttttttttttttttgagatggagtctccctctgtcacccaggctggagtgcagtggtgcaatctcagctcactgcaacctcctcctcctgggttcaagtgattctcctgcttcggcctcctgagtagcaggggttacatgtgcctgccaccatgcccagctaatctttaatctattttgagttgatttttgtctgcagtgtgagatagggctctaacttattcttcggcatgtacctttccacttgtatcaataccatttgttgaagaagctgtcctttatccactgtatgttcttggcatctttgctgaaaatcaattgactgtaaatgcctggatttatttctgggctctctattctgttctttcttccagttatttttgtgatcttctatttatggcaagagagaatggttttccatttgtagctgcgatgggatgtgaaaaaccgtggcgctggtggggacaggagggctgacgtttgggaagtgggatagtttgagccggcagagtgaactaatcccagacttgaagtggggagctggacctcagaggagaaatcctgagactgggatcaggaggccgcttttgcaaccccagatgatgcaaccagaggtggggggatctgggagaaccaggaagactgagacagatggagacagtcccagagactgagagacacagagagagagatgagcactgacatcaaaagagacagagacatgaagagataaacagagacgggtggggagtagggagacagacggacagagaggcacagagtcagatatgccagaagtatctggcaagagatgagatagagacagagaaaggcaaagagaaggagagagacagatatggagaaagaggaaaagaggctgggcgtggaggctcatgtctgtaatcccagcactttgggaggccgaggtgggtggatcacttgcggtcaggagttcgagaccagtctggccaaaatggtgaaaccccgtctctactaaaaacacaaaattagctgggtggtgacacatgtctctaatcccagctactcagggggctgaggcaggagaatcgcttgaacccaagaggcggaggttgtagtgagccaagatcgtgccactgcactccagtccgggccacagagcaagactgtctcaaaaaaagagagagagagagaaagagagagggagatgcttgagcttggatagagaccgagagagatgagagcaactgaggcagacagcaggagagagagaaagcaagcacagagtgagtgaggaagaggatgagagcaggtcagggcagcatttcactttgtggagactggaggccgagccacgccggatggaggctgtttgtcgctgggcagtggctgtgtgtcagatgactcctgccatctcacagcttgtgctgccagagggattggggttatactaattaaccgagagccagccagagcctcattagccaggcagagtctggtgtgtcctcacccccttggggaagctctgccactgacctgctcaggtggccaacaccaggctcttggctcatggttttctgcgaagcctgaggcccgcatctgggcagggtggggtccttgctgcaccaggtgagaaaaggctcttcctgatagagaaggagccacgtttggtcttttcctggtgggctgacagcagggtgagcttggcattggtctggcccttggttgtgggccgagtagggaggacaggactgcctcctctttccctaggcctcatgacaagggccaggcagctggacacgctggactctgaggcccccaggtttccctctaattctctaacatgtttgctttccacatcctggcctcgcttcacattccagctcattaggcaggacagggccccatttctccaggactctgccaatttggaaaccccaagggccccgggactggggttcctcctgctccgacatgacccgagcttcctgataggtgggaaccgccaccactgtgaggatttcacttcctggctcctggcctgctgggaacccctcacccgcaaccaacatccacagcaggaaaaaaaaaaaaaaagatggaggggagggagggagagacccacagagacacacagaggctcagacagagagaaaccaagaaagagacaaaggttagagagacagagacatagacacaagaagggagggagagagaaaggcagagagacagatagagaacagatacactcggtttagctggtgtctgacataccctcacttaatggaagttactcccttctctactctaacaattcttctaaacacttcaaggcaaaagtttcagctgctgcttatgtgtctgtaccatcaactgatctctttttttttcagccaacagggaaacagaaaaaggtccaggcttagaaccttctggaggaaatagattctagctaggatttagcgagtgcctacgtagtattaatatttaggtctgaggtgatcttctattaatggaaagggtgatgggtttttctttaaagacagggatgtaaattttccttttatcatacatttatttacatttttaaagtgattttaggccaggtgcggtggcttatgcctataatcccagcactttgggaagccaaggcaggcggatcgcctgaggtcaggagttcaagaccagcctggctaacatgatgaaaccccatctctactaaaaaaacacaaaaatcagccgggagtggtggcgggtgcctgtaatcccagctactagggagactgaggtaggagaaccccttgaacccaggaggcggaagttgcagtgagctgagatcgtgccactgcactccagcctaagcgacaaaaggaaaactccatctcaaaaaaattaattaattaaataaaagtgattttaaaaaggaaaaataagtaaatagtcgagtttggtatttggcaagaatcgtggaagtgattctcaaatgtctggaatttggcagtaatctttaagtctaagcttcttagccgagataccaaccagccctcctggcttaagccctggccctgatccattgtcctctctttacctcagcccagtctctgatcccacccagccccaaccctacccaattcctgtcttcacctagcccccgaccccgcccagtccctgaccccacccaatccctgtcctcacgtagcccctgactccacccagttcctgatcctgaggtccctaaacatctggtgtttctagcttctctgtgttggcacgtgtgatgttgtcggcttggaattctcattcccccataaggtctactcctatttattgtgaaaacccagctcagacaccttggaaagccttccctgaccaccctctcaccctcagttaatggtttcctctgtgttgtttcatattttcaaacctgcacaatgcccttaccattctgttctgtacatatatacatatattttatatttgttcacacaaatctgtgagcaacctgaagggagtgactgggtcgtcttatttgcgtctcatccctcggtgcccagcatagggtcagacacaatgattgatttacaaagtgatttgacttgcatcaggctttgtccaaagtgtggattgatatcttcaaaattaggtcagcaagctacagctggagggacaaatctggcccgccatctgtttttgtaaataaagttttattgagatgaagccacatggatttttacatatctgcgactgctctcgtgcacagttgagtagttgcaacagagaccatatgacccacaaagcctaaattatttatcatgtaaccctttacggtaagtgcttacccatccttcttctaaaggacagcaggggccaggtgtggtggcttatgcctgtaatctcaaccctttgggaaactgaggcagggggatcacttgagcctaggagttcaagaccagcctgcgcaacacagcaagaccatgtctacaaaaatatttaaaaagttagtcgggcttggtggcccatgcctgtagccctagctactcaggaggctgaggtgggaagagtgcttgagcctgggaggtcaaggctgcagtgagccatgactgcaccactgcactccaacctgggtgacagagtgagactctgtctggaaacaaaaaaaaaagaataaaggacaaatctgtttggattggggggagcctctgggtatgtggtgggacatggaggtgggaagaggactgagaagctactgggtggctttctgggagtccagggcttgcaacacacacctgctgtgtggcccaagctgggtactctgtgcaggtgcatagtccaggaatgactcctccctccctgcagggataaccgggatgctcagcacgtgctggagagggacctcgaagacaaaagctcggcccagtgtatcgatgagaagtgctttaacctgagaaatacgtcagactgcatcagcttcttccacggcatggagaaaattgacggcacgtaagtatcagactccccctccccatccctggcgtgtccaactggagtgagggcttctgctcctgccaacgaatggcgaaggggcatcgtgcaccagttaagtgggaagtggcatggttgaacggggatcctctagcgcaggcggcagaatccaagtcgggttagcttaagacaagatggaatttaccggaggaggtatgggggagccacgaactcaaggggaaagcgggaaggaaaggttctggcagtaggagctgtgtggtcagagcgccttcatctttccatccttgccccaccattcaagatccaaatttcaggaagagagggcatggcattggcttagtgagggtcgcacagccactgccactcagcagtttcaccaaaaaaaaaaaaaaaattccgaaacaagtgacaacctcggcagggagaccaactggggtcggctggtggcggggtggtttaacagagtgaattcttgcttcgccaggcttgttggcttacccctgtaatcccagccctttgggaggccaaggctggaggattgcctgaggccaggagttccaggagttttccagaccagccagagagagagagagagagagagagagagagagacagagagtggaatctggagccaggctacgtggcttcaaatcccagcctctacgctaacactgagcaagtcacttcatttctttgggccatttctgaatctataccactgggagaaaattaagtacccacttcccagggctgctgggagtatgaaaaaggtgggtgtgtgaagttttaagcacagagcctagtatagaataatcacagccaacatttatcaagtgcttactgtgtgacctcattttctcgtcacagcagctatgaggtggtgccttctgtgagcctgtcatgatcgtgggcatatcacagcattgtgaggttttttttttttttttggtatttttcttatttatttatttattattattattatactttaagttttaggatacatgtgcacaatgtgcaggttagttacatatgtatacatgtgccatgctcgtgcgctgcacccactaaatcgtcatctagcattaggtatatctcctaatgctatccctcccccctccccccaccccacaacagtccccagagtgtgatgttccccttcctgtgtccatgtgttctcattgttcagttcccacctatgagtgagaatatgcggtgtttggttttttgttcttgtgatagtttactgagaatgatgatttccaatttcatccatgtccctacaaaggacatgaactcatcattttttatggctgcatagtattccatggtgtatatgtgccacattttcttaatccagtctatcatcgttggacatttgggttggctccaagtctttgctattgtgagattttatgcagaatgaaaacatgcttcccagttggtagtctgaggtctgagagatgctcgggatgagaaagagggtggagtctatcttagttctgccttcttctgttaaaaaaaaaaaaaaatccctagcacatagaattgtgcttggcacatgttggtatgcaataaatttttattgaatagaagaatgaatgaaggaggaagggagggaaagaagaaccacaggaagggaggaagggaagcgagaaggaaggtgttccttggcattctccttggcccaagcctggggtcactttctggatcttacaaatgtcacagtgctgaggtgaccctttgggacttctggtaatgacaactcctggggactttccttctcttcctgacaaggtgctctcctccatggcactggcaaggtgagcaggactttgggggctgggcccccctcatctgcacagggagtccagagggtctctcttcccaaacagattcctctccagaaacctggcagccccagagcctccaatttccacacccaggagggacctgctccttaaagtcccccatctggagactccatctggagaagagagctgctgtttgtagcaactaattgctccccagatgtgctagcttggggctttgtatttgtggttttcttatttatttatttatttatttatttgagaccgagtttcgctcttgttgcccaggctggagggcaatggtgcgatctcggctcaccacagcctccatctcctgggttcaagcgatgctcctgcctcagcctcctgagtagctgggattacaggcatgtgccatcacgcccagctaaattttttgtatttttaatagagatggggtttctgcatgttggtcaggctggtctcaaactcctgaccttaggtgatctgcccgcctcggcctcccaaatttctgggattacaggtgtgagccaccacccctggccttagggttttcttaaagcagggctatgtctgggcggatgaaacaggacgtttggtgactgtctgaattgcagtatctctattcactgcagttctcattaccatggattaacaatgatgataatgatgatggcagtagacaccttttttttttttttttagacagagtctcgctctgtcaccaggccagagcgcagtggcacaatctcggctcactgcaacctctgcctcccaggttcaagtgattctcctgcctcagcctcccgagtagctgggactgcaggcacatgccaccacgcctagctaatttttgtatttttagtagagacagggtttcaccatgttgggcagggagagacaccttttacctggtgtttgctatgtgctagacattgtgctgacagcttcatatgcaacatctcatgaataataaacattttttgggcgcttactctgtccagtgccatgacaaggacttcacatttaaacactcagcaaccctgggggttggtaccattattatctccattttacaatgaggaaactaaggctcggagaggtgaatcgattggctcaagctcacacagcaaatggcagagctgtgattctgaatctacattgaatactgagcctgtgtgttttaccaatggtgccttcctgcctctccagcaaagccagctgtcctctccatctttagagaacaaagactccagaaagcacttccccctactgagacacactgcctgctgaggaggcagactgtctttggcaaattcctccccagggagaatgtgattaagcgggttattttctctggggagctcagctgcctgctgcaggggaggacaagggcttagaggttgctgtttatgacactgacactgtccccccattcagaggcaacagagacactcaaagtaaatctgcatgtttctctctgctgtccttattgtctcctctttcctcagtgtcctgggatgggacgttgttgtgcggccttgaacaagatgcttcactctctgagcctcaggtcttggttggatgaaagctctgaacctgacttagtgccactcctatctccagaagcccgagatgcctgtttattgcttgatttttaactcctgcaaaagccaagcaaaacaatcacacaagctatatgatttttaaaactttctatgcaccatgcaacctaagtgtgctttaaaatgtctgaaaagaggccgggtgcggtggctcagacccgtaattccagcactttgggaggctgaggtgggcgaatcacgacgtcaagagatccagaccatcctggccaacatggtgaaaccccgtctctacaaaaaatgcaaaaattagccaagtgtggtggcactcgcctgtagtcccagctacatgggaggctgaggcaggagaattgcttgaacgtgggagacagaggttgcagtgagccgagatcccgccactcaagaccttcagaagttacccaggacctgaagccaggtcaaagaaatgcatgcccttcctcaaagccttcccagatgagaaaaccccacatagtccattggttgcttgttgcagggatttacatgctctgccaggaagaactttactgaggagttcctcatgtgtcaccacctctaagaagccttccctgcctgcctttgctaatgtagcctgtgtccatgtccattgatctccccagatccattctccagctaccacgctgtgagtcctgcatggccgactatcctctgcagacctctcctgggctctctgtcctttggtttccagatggtttcagcctggaggaggggtaccagcagaagacagagtgtgggaggggagaggctgcgatttcttctcctgctacctccctcccagacacactggtcaaccatggttcctccttttctggggcttttataacacctattgcttccttttctcttgccctttacagctgggatagtgacagcttcatgcattttctttttatttttttgttgggggggacagggtcttactctgttgcccaggctggagtgcagtagcgtgatctcggctcgctgcaatctctgactcccagttcaagtgattctcctgcctcagccttccgagtagctgggattacaggcgtgtgccaccacacccggctaatttttatatttttagtagagacgggatttcaccatgttggccaggctggtctcaaattcctggcctcaagtgatccgcccgcctcgggctcccaaagtgctgggattacagccatgagccatcacattcagcacttcatacattttctaatcccagacgatctcaacacccttccgagtattccatctattcccgtttacaaccctgaccaacacataatgacaccactccatttgtctctttcatcctcctgctgctgctgcttcttttgagacagggtcttgttgtgttgcccaggctggagtgcagtggtgcgatcatggctcactgcagtcccggactcctgggctcaagcgatcctcccacctccgcctcccaagtagctgggaccacaggcatgcaccaccacatgtaggtacttttttttttgacattttttatagagatgtgggtttcaccacattgcccagtgtggtcttgaactcctggactcaactgatctgcctgccttggcctcccagtgtgctgggattagaggcatggctggcccagccctccagtttctaaatcccttcccagcacataacacaatgtgtaactatctcctcattcactgtcaatctccctcctctggcacttaaccgccatgaggacacggatgttgccgttcttgttcatggctctctcctaactgcctggaacaatgcttggcatgtcgtagaagttgaagaaatattccatgaatgaatggcagtgaaagtagcgtggccacattcccatcgcagagttagggggttcagggaccccaatgaagaagcaggcccaaagcctgcttcttggcttgtccacgttgtgtttctggtggtggtggtgtgggtgttagggaaaagagctctctgcgggagcccctctctttgacccactcactgagtgcccttctgccaaccagctgctctctttagggttctcttgcttcccctgtaaaatgagggtattggatcaggacagtggttctcaacaaggggcgactgcaccctcccatttggcagggtcatttggcgatgtctggagccattttttggttgtcacaacggggtggttggggagctactggcatctagtgggtagaggccagggatgctgcttaaacatcccaagcaccctacaatgcacaggacagagaataatcccgacccagaggccaagactgccaaggcggagaaaccacagattctgaggtcttccaggactgctgcaactcacccttgtgcctttgcaggatctccgtacctgagacctgggccaagttcagtaacgacaacatcaaacactctcagaacatgcgggccaactccatccagctgcgggaggaggcggagcacctctttgagaccttgtcggatcagatgtggaggcagttcacagacaccaacctggccttcaacgcccgcatctctgaggtgacggatgtgaagaataagctgcagacgcagctggcgaaggtgagcagatcctcccaggacccctgccttctctgccaagccctcacccttctcccgtgaatctgagtgttatctgggccaagctggccctgcccctggtgccaaagcagtaccctctctcccaaggtctgtggtctttttcttcctaaaaggggccaagggctgagcttcctggggggatttaagcatccatagtccatcttgtcttgcttacaagcctggagcttggcctagctgtgcccaagaggctgtgacactcccaggaccccttattttccatctaagacccatgtggccgagcgcgagtgcagagaacggagcccggcacaccatagtctctgccacttctgcacatcttctccgtccacagcagcatctttggaagtgtaatctttgacttccaaaggcctgaacggtaccgtaacagtctaaaggttccctgctgaggggtggggtgctttttggatctgaggagtctgcagcactgcccgattctgtcgtctgcgtgctatgcctacaccagtgtgccctttaggcgttttgcgtcatgctttttcacacctctgggttggctcttggagtcctctttggatggaatttatagtccctgctcaatgcaaatttagattcccactgggtgccagatgctgcgctaggcactaggaataaaatgaggagccgtataaacatgggcgctggcctctggggacttgacattctcctggaggaacagtggtggctgtgaaatttatacacagaaagaacttggatgatagtcaagtcagagggaactagccttgaatttgtgtttgcagaacagtacccctttttaaggccaagcacagtggctcacacctgtaatcccagcactttgggaggctgaggcgggcagatcatttgaggccaggaatttgagaccagcctggccaacatggtgaaaccctggctctactaaaaatagaaaaaattagccaggtgtggtggtgcttgcctgtaatcccagctacttggggaggttgaggtgggagaactcgcttgaacttgggaggcagaggttgcagtgagccaagatcacaccactgcactccaacctgggtgacagcgagaccccgtatcaagaaaaaaaaaaaaaataagaactgtgccctttcttattgtgtctctatctttggggggattagtgggctgcaggcagggtttgatggaaattacagtggtagtttcagcccacctacatctgccacccgttgatctggtactccaaaagagacaataaaataaataaataaagtttatttttcttttcttctctctctgttttttttttttttttttttttttctgagatgatcttgctctgttgcccaggctggagcacagtggcacaatcacggctcactgcagccttgaactcctgggctcaagcgacccaagtagctgagactacgtgtgcgtgccaccacacctggctaggttttttagttttttgtagagacagggtttcgctatgttgcttaggctggtctcaaactcctgggctcaagcagtcctcccacctcagcctcccaaagtgttaggattacaggcgtgagccaccatgactggcctcgaaacaggagtttccatgaaatcattgcaacatttttatagggagggagcaagggtgggtgagccagatattctcatgggacccacactgggtggagcagagaagcaggggacgttgccaccgagaacagatcaacagggagttgagcggccaaaagttggtgggaagaggattccggagagagcagcaagggcaaaggaagcgtccgggatgaagctggaggaaggggcaggtgggtctgggtaggcctggtgaagggtttggattcctacctaagagcaatggggagcctttgaagattttaagcaggacagtgtttggatccaagcttgtccttttgttgatttcttttctgcctgcgtggcagaagggacgcagaggttaagaatggatgcagcggccgggcgtggtggttcacggctgtaatcccagcactttggaaggcagaggcaggaggattacttgaggtcaggagttcgagaccagcctggccaagatagtgaaactccatctctactaaaaatacaaaaaatcagctgggcatagtggcatgcacctgtaattccagctactcgggaggctgaggcgggagaatcatttgaacccaagaggcagaggttgcaatgagccgagatctcaccactgcactccagcgtgggagacagagtgagaatctgtctcaaaaaaaaaaaaaaaaaaaaaatagaatgggtgcagtggttaggaggctccagaagaggcccagggagtggggaaggctgcctgtgctgtggtggtgacatcaagtggaagaaggaccagaaaagggtgagatacctggagaaggcaaagttggcatcgagttggcctgtgcaccttccctttatctttcatgaactattttcctactaatcctctaggacagggttggcaaacttttcctgtcaaaggctagatgataactgttttcagctttgcaggcaatacggtttctgcctctatactgcaaaagcagccgtggacaatctgtacaaaaatgagtgtggctgtgttccaataaaacttcacaaaactaggcagtgggctggatttggtccacaggttgtagttttgacaacccctgctctggaacttagctcaaaagtcgcttcctccaggaatccttcctaaactccacggtttatttgcactcaccatctctgggtggccactgcgttctgagactgtgttttcattgctccttccatctcatatcttttggctagaagcactgaccctgagccagactgcatggttatgatgaatcctctataaacttggacaactttcttaacttctctgagcctcagtctccttgtttgtagaatgaggataggaattactgtcacaggaggctgaggcaaggaggatcacttgagcctgggaggtggaggctgcagtgagctgtgattgcaccactgcactccatccaacctggacaacagagcaagatcttgtctcaaaaaaaaaaaacaaaaaaaaacaaaaacaaaaaataactgccgtgaggattgagttaatgcaggcataacacctgaaggagtgcgggcacatagtaggcaccatgtttgtgctagtggctgtgatcttaatgtactagttgatttacttgcctatatgttttcagagcactgctcctgatttaaccttgtccccctactgcttaataactgcctggtactccttacatctttctgcaatgaatggaaggaatctacaatgttgaggtggtttttttgagacagtctcgctctgtaacccagtctggagtgcagtggcgcaatctcggctcactgcaacctctgcctccctggttcaagtgattctcctgcctcagcctcctgagtagctgggattacagacaccccccgccatcacgccccagctaatttttgtattttttgtagagacggcgttttgccatattgcccaggctggtcttgaacttccgggcccaagttccctgggctcaagtgatccacctgcctctgcctcccaaagtgctggaattacatgtgtgagccaccatgcccagcctgcaatgttgagttttgtactgaggtttttttttaaagaatgaagcatgcatgaatgaatgccttaaatgtccctttttctttttttcatgcaaagacccatttttattatggtaaaatacacataacataaaacttagcattttaaccactcttaagtgtacagttctgtggcattaagtacattcatacattgtgcatccatcaccacaatccatctccagaacttttccatcttcccagtctgaaactctgcacccattaaacactccctccccttttccatctccccccatatccatggtaatatcatttggctgtgtttccacccagatctcatcttgaattatagctcccataaaccacatgtgtcagtgggagggactcagtgggaggtaattgaaccatgggggcaggtttttcccgtgcttttctcgtgatagtgaataagtctcttgagacctggtggttctataaaagggagttcccctgcacattctcttttgcctgctgccatgttagacgtgcgtttgctcctcctctgccttccaccatgattgtaaggccttcctagtcatgtggaactgtgagtccattaaatctctttttctctataaatatcccagtcttgggtatgtctttattagcagcagcattagaacagacaaatacaagtaactaccattctgctttctgtctttgataatttgactactctatggacttcatataagtggaatcatacagtagttgtcctcctgtgactggttaatttcacttggcataatgtcttcaaggctcatccatgttgtagcatgtgtcagaatttccttctttttcaagtcagagtaatattccattgtctgtctataccacgttttctttatccattcatccatttatggagacttggtggcgtccatcttttggctcttgtgcatcttcttttaatgaggcatctcatacggtggatcaaatgtagttcattgtcatgtttcattgcctgaagtttgtggtctggggatgacttggaaaggctcttttagttggctattggtacctggtttctcacctgtgaaacagggataagaatttctacatggtaacattactgtattaatgaggtaatctctggagctcttaaaacagtgcttgacaaatgataaacactcagtaaaaaggtaactgtaagtattaatataattactgatggagagagaaaggatcttttgaatggaggtggggagagcaaaaccttttcgctttccaaattcctctagtgaggatcccttgagccccggagtttgatgctgcagtgagctatgatcgtggcactgcactccagcctgggtgacagagcaagacattgtctctaaaaaattaaaattaaaataagttgaaataaataaataaatacataaataaataaataaataaaaataaaaattcctccagggaagttttgaattattactaacaacctcatcactacagactggagggtttttgcaacctcatggatttttattaatagtcataatttaatcaccagctgttctgcaaataagttagcacccatctgaaatgcaccaaactccaaccctacgctattgacattttcctgagcaaggatttgtcttctggttggtgaatttcacatggtgttattctaaaataataaaggaatttgatgcaatgaagataaatgtatagcaaccatttcacttttcaacagtttactttggctagaggatttgaaatgctctcttctttttttgaggtggagtctcactctatcgtgcaggctggagtgcagtgacgagatcttggcttactgcaacctctgccttccaggttcaagtgattctcctgcctcagcctcctgagtagctgggcagctgccaccatgctcggctaatttttgtatttttagtagagatgaggtttcaccatgttgaccaggctggtctcaaactcctgatcccaggtgatccacccgccttggcctgccacagtgctgggattacaggcttgagccaccgtgcccggactgaaatgctctctttaaaaatgtaactgttattagttgagcttagcctgatagtccttggcaaaaggcatttctggaaaattccaagtgcccatccttacctatgctgcaaggcagttatttcccaagtggtcacaggaatccaccttgtaagaccaaatctacacggctccacgtgcagacagtggtttggggctgtgcagacagcctcatctgttcactgggatgctagagttctgtcacctcggccacaccccaagcctcatagcttgccccggggcctcatccttgcactttgaggctccaggtatcactgtgtcatactgaccactgctagcaaaggagctggtgacttctctggactaaagaagttggtggccacagagtgggttgctgcctttgagtgctgattcctctgagacccagggccctggaaacttccagaaaaacaacccctcatttacatgcaattacccaagtgaatgtgcatttgagtgggggatctcttaatgtgtagggggaaaagatgcataaatatggtttttgggggtaggatgtgtggggtcagggatacttctatggagaaagtgcttattctgacattgtgggaactagaccctggcaggtgaaatattatatgtgttacatggatatagcattaatatcactgaatcatacaatgagaaggttattccttcttcattgcttctgaccatctcaaaagtgctagaatgccttccttacctcttttaacacctgccaatctcccttttataatttttttttggagacagggtctctctttgttgcccaggctggagtgcagtggcacgatctcggctcactgcaacctccgcctgccaggttcaagcgattctcctgcctcagctttccgagtagctgggattacaggcatgcaccaccttgcccagctattttttttttgtatatttagtagagatagggtttaaccatggtggccaggctggtcttcaggtgatccaccggcctcagcctcccaaagtgctaggattacaggcgtgagctaccgtacgtggcctcacctgttgataagcatttcggttgtttccagtttggggctgttacaaataaagctgctgtgaacactcatgtacacatatttgtatgcactctcacagagttcaaaaaatatttggtaaaaaatggtgatttcacataaaaaaatttcagatttccagcgtctcttgaaaaattagtagctctagcaattcagagctcatgtttctacaggggaacagtgggtaagggttgagtggctgctgcctctctttgggtcaggtgctccagttagcctcagaccccaccactccctattacagcacgcttccctcatttgcattatttacttgatcctgtagccctgtatttgtgcactctgctttatatatcagaggaaactcagacaggcagataaacaaaacatccaggcataggaagaggttgaacagaacagagaagggctatgaattttaaccttgaagggctttggtttcattctgaagtttctttggggttttgactcccaagcagccattgttagcatcagcaaaaccaccccttcccaggaaggcctgggcaggaaggcctggcgtctgaggggtgagggcccctgctggtgatctgaggccctgcgtgtctactgccaacccctctgtttgtccaaggaggtctggaacccattgtgcagtgggaaatgcttttgtgctttgcagccgattccttccagcaccggagcctgcagccaagctactgacggctggtttctaaaaccggcccagccctggggaagtggagctggcagcctggccctgtgctaccctcctcatgagacaccactgcatcccagggagaaagtctctctcttctctgatggtgtcacggaggaagactcatcatgatgccgacctctctttaacacctatccttcctttgcccgtctgcctttctaacaaaggcatcaggcctcaggcttagaagctttggaaagcaatagaacctagatataattattaacttcttttttccagctaggtgtggtggctcacatctgtaatcccagcactttgggaagccaaggcaagcagatcacctgaggtcaagagttccagataagcctggccaacatggtgaaacctccgtttctactaaaaatacaaaaattagctgggcatggtggcgcatgcctgtagttccagctacttgggaggctgaggcaggagaatgacttgaacctgggaggtggaggttgcagtgagccaagatcatgccactgcactccagcctgggcgacagagcgagtctccatctcaaaaaaaaaaaaaaattattaacttatttttcccattttgcctattgttatggtaccctctattggtggaaaacaatagtagttttccacttgtggaaataatttaaagatttcatttcaaatacatatgttaaagcctgaaacaggctgatttgaagaaaaatattaaatgattatgtagatggtatgtggatatgggaaatatgatgacgatgctgcccagtacctgaaatttgggaatgttaaaagaaaaacttaaagcagattaaatttaacagaatttaattgagcaaagaatgattcgtgaattgggcagccccctgaaccagaatggattcagagcaaccccaaagctgccacgtggtcggatgatatttacagacagaaaaaggaaagtgatgcacagaagacggaagtcaggtacagaaacagccagattggttactgctcattgtttgtttgccttatttgaacatgatttgaacagttggctgcctgcgattggctaaaattctgtgattggtataggagtcggttccaggctgttcacacatccagttaggttacagttcactgtgtaggggagagatctttaacatacgtaaggaaggaagccaggcgtggtggctcatgcctgtaatcccagcacttttggaggctgaagtgggaggatagcttgagcccaggagtttgagaccagcctgggccacagagtaagatcttgtttctacaaaaaacataaaaattagctgggcatggtggcatgcgcctgtagtcccagctacttgggaggctgaagtgggaggatcacttgagcccaggaggccaaggctttggtgagctgtgattgtgccactgcactccagcctgtgcaacagagtgagaccctgtctcaaaaaaaaaaaaaaaaaaaaaaagtaaggagccagtgttaggctgaatgaagtttagttcatttcatcggaatccctggcagaatagttacccctgcatcagtgtagatagttcatatgggcaactgtgccatgaaagtgactgccatgttttaggaaaacacacccgcatcagtattcaaataaggaaacagccgtatgtcctgatggagggatgaccaggttgcaagggcacttttgacgagacacagttctcacgccttgtattgacttcagaacaacaccccatccctggcttcataaggtgatccacccatgcagacactcagtaatcaatggctgctgttcattcctgtgcaggcgttccctctctctgcagtctgcattttcttagaagttgtggcctgagtaattcttcactgtagtggttgtcagctgaaggcagttgtgtcccccagaggacacttgaaatgtttggaggcatttttggttgctatagtttggtgagggggtgctgctggcatctactgggcagaggccagggatactgctaaacatcccacacggcgcagggcagccccccacagcaaagaatgtttgggcctgaatgtcagtagtgctgaggctgagaaaccttgttttaaaggaattccaggcaccaccgaggaacaggaggggagggtttgaggaggtagaagacctccagaattcttcagatctgcgtgagtcctgaactcatgaactgttgcctgaacaggccaattgccctcttataaactacaagattccagaagataggaagaatctgagtgtataaaacctggactgtgcctactccccgtggcttggtaaacagggtggttcttcagggcatccacacccctatatgggtgcacaccaccatgcccggctaatttttgtatttttagtagagacaaggtgtcaccatgttggccaggctggtctcaaactccgaggtccaccagcctcggcctcccaaagtgctgggattacaggcctgagccaccgcgcccagcccctgttctgttgaagactgcgttcctgtaggtgctgggcttggtgtgaatgtggctttcagaggctctgctatctgtgggtttccagctatctcaggctatagctctcaggaaaaggctcagggccatatgcatgcataggtaggtctctacctgatgcccaccttagcaccaggaggaatcaaaagcccttccagtgtcacgtgggctcaggtctcatcatagtacgtgggtggtgtgtgcctggatggacccagcatgaggggtccctgggagttcagacatgggaaattctgagagctgtgccaaaaggtgggctggtcagggtgactgtgtcacagcttatcagttcatgggaacactatgccaaatgggagaggagctgctggaatcaggaaggtggagccaaggtccagagctggggaggtaggcgacagatgcaggaagttggagggaccatgcaggagatggagagaacgaacacgggagagggcagcacaaacgagactgtttctagctcattttgtgaacaccacctatgctcaggaacgctagtacttctttcctcccatggctggcttcaaatggtgacagccaatcatatgctttgcctggaagccctgggcagggcaatcactgggattggttcctggtgagatgagaagaatataaggtgcagcctggccaaggcagagggttgcggtgtcatctcccgggtaatgttatgccccagcattcccctaattttttccaagtgatgactcctccacctttgtgtctttgtctgcttgctagcatgggacctactggctagcctcacctatgctccagctttgacatctgctggcctcctccttggtccagcctccccttccatctccaccttctgtgtcccgacaggtaagacccatagtgtattgcagagtgctgggctcatttctggctccagcacttcctggctgtgtggccaaagtcaggttgccctacctctctgtgcttcagttttttcctctgtcaaatgggagtaatgatgattgacaagcagttgtgagaataacagcagctgtgcccatcccttagtgataatgactattagctataaaaatagtacaaagctatggtctgctttctcatctgctgatgtgggagggatgacaaagtaacggaaagaacctggcacctggtttgaattttggtatgactaaggggtcttgaggaagtaactaacccttctgaatctgtttcctaatctataagaaaggaacaatcctaccagctgtgaggaacaagtgagaaggtgcaggtgagccgctctcagccttagtgccacattggaattgcccagatgcctgggcctcactttagggattctgatttaattggccagggtctggcctgcagcagatctttttaaaactccccaggtgactctaatgcacagcccaggactgaggaccaaaagttaggtcttcagaccagtggttcttaaagtgtggtccttggaccatcagcatcagcattacctgggaatttgttagaaatgcacgttctcaggctccatccaggacccactgaatcagaaagtctgccagtggggtctagcgatctgagttttaacaagcccgctaggtatatcttccaggtgtagacatgcaacaattatctgttgttccctccctccctcttccttccctccctgcagcagatatgtacttagcccatcctatgtgctagactgagttaggcgctggggattcaacagtgaacaacagacaagatctctgccctcagggggcttacattctagagggggaaatagagttaaaaaaataagcaaacacacaattaattaaaagtggtaataagtgttaagaaggaggccctcaaaggcctgagatgatgaattatcatgaatttttttaagagcatattggtctctcaggcaagaaagcttctacccgtttctaaccccattcaggactttcaggacctctgacctcagacagcctctcaacagctgatgcatgtgctggcctgacatattccgaaagcagctgggctaccacttgagagaaacggctgcgagcaggacctgctcaacatttatctcctggagtagtggttcccaaccagggtgaatttgcaccccactggcatttgccaatatctggagacatttttggttgttgaaatggctgggggtggagaatgctactaacatctagtgggtagagaccagggatgctgtgctaaacagcccccaatgcacaggacagcccccacagctgagatatatctgggctcaaatgtcaagagtgccaagggttgagagtcccagctctggggcgttcatgctctgaatccctgaccgggtccctccggagcgctcctctcctctttctctctctccttgctcctgaatttggctgaacttgaaaatcttccaccatttgaccagaaaaggatttcaagctgccttcctctttcctgagctggggatctgcactgagccaagcatctccttggaaactccttggcttcatgcaatttggaaaacaataaatttgcaaggttgcacaaaacatccagaagcctaaagctggctggaactactaaatccatttttttccttccacatcaaaaataatttcttggccttagaggctttctccactgtcacaagacacaggcagatagttttacatggtgaacaaccctgccaaacatatctctgctttcagagctgttgggtggatttctagtccagccaggaatatcagcacacttttccactgagccgaggttggttttatctgaggcagacctgataattgcctttcacaccccatgcatggccagagaccattcccagtgctgacctcaaccctttccacattctgggtgcagggttgagggtgagtgggtggatggagtggagatttgcttccggcttctcctctgcagggggtgagagtgggtgatcataattgagttttccatcctgctgcaagccgaaggagaaagaaaatgataacttactgtaacaaagacatattagccttactgagagctttacttaggtgagcttatctttccctcccatgaagaaggggttattattagacctgttttacagatgaggaaactgaggactcattacaaaaagtgatttgcctaaagtccccaccactaaccactccagctaggaaatggcagagctgtgttttactccaggtggtcctgtcatgggtgcaactggctggggccagtgctgtggatggtaaaagaatttgccaagatagtcatgggtaaagaaaggcagatgtattggagaaagtacaaggatacgttgcaagaaagcaatgggcagcacagcacagaaggggctgcctgcaaagaggcaggagctggaaggaagttttatagggtggtggtgccggggctacgtgcagaacaaagtatttgggaacagaatgctgtgcaagtgagttgtttgtggttaaccgtctctcagaacaattgttctccccaacctggggccgcctcctcgttgttgctgacttaggactccacaagtcctgctctagattctgagcttcaggttaatagggacacttcccccacctccacccagccttatgacaacagtaataggtcaacatctaaagcagcagttctcaaacaaggtgattttgcccccatttcccccaggggcatttggcaatgtctgaagacatttagttgtcacaaatgggggtgcgtgctactgatgattggcatccagtgagtagaggccagggatgctgccaaacatcccacagtgcacaggacagtccctaccccccaccatggagaatcacccagcctcaaatgtcaatagtgccaaggctaagaaaccctgatctgctagcattaaggtttaatttaagaagagagaaaggaaaaaagatagtagataggtagatggctaggcagatggtagggtagatagtgtggaggctgagggacccagggctctgaagggcttactgtgtgctggccacagtgctgaacacattacacgggttacctaaatccatcctggaagtcaccttctaggatagatgctattatcatcttctttatacacatggggaaactgaggctcacagaggtttggtgatttgccaaggccacatgcttggcagtggctggtggctccccaacctctcttctagaaggttcctctggattgtagtgaggtgggcacactggaatccgaataccactggcctctcctcactccgcacattccataagttctcaagtccttcctacttcatcttttggatactttggtgacctcgtttctttagcaattgtccacactgcctgggtgtgagtcctcctgtctctcagcttgtccagattgtcccctctgtctatcctccaaatggcagccagagagatctgcatgaaactacaaacataatcatgtctttctcttgctttaaagctttaatatgcatatgaatagcttgggagtttgtaaaaatgtagattctgtgctgagatctggggtggggcctgggtttctaacaagctcttcaagtccaaagatgctggtccagggaccacacttggagtagcgaggtgctgcagaaattgttctctgaacacagaaaccccagaggagcagcagacttacatgagatggacagctttgggggattgtgatttcccctggaatagtttataacaggggttgcaaactcacagccccaagggccaaatccccgcccctccgcctgtttttgtaaatagttttattggagcacagccatgcccaatacattttcatgttgtctgcagctgcttttgtgctacagtggtcaggttgagtagtttcaacagagatcataaagctgtatattgagacttgcagcaatttaaagaggatggacttgaagaagaaaaaacaaaacacagccgggcgcggtggctcacgtctgtatcccaacactttgggaggccagggtgggcagatcacttgaggtcaggagttcgagaccagcctggccaacatggcgaaaccacatctcaactaaaaatacaaaaattagccgtgcgtggcggtgtgggcctgtaatcccagctacccaggaggctgaggaaggagaatctcttgaacccaggaggtggaggttatagtgagctgagatcatgccactgcactccagcctgggcaacagagcaagactctgtcttcaaataaataaataacacacacacacacacacacacacacacacacacacacacacagccttgcactcctgctggtaacattctcagactggcttttgaaggaagtggcggctctgggcatgtgtgggagtttgaaggtggaattcatagagaacattacctggccagtctctgtctcccggatgaggagatagcggctcagagcagtcaggggttctgagtgggggtctgggccccacagttggtttgtgttagggctgagatgggaacctgggcctcctgactgaccttttacctccaggacaccctgcacagaattctgccagcaggtgggggtggggtggggggagttacttaacatgaaaccctttggtcagccaaaggtgggggcatgtggcccaaagagccacctgccacctgccttgggcaggctctttttctgagccacattccaaagactgaggagagcccttttctattacacaggcaacccccgtcttgaccccttacactggaataagtgggttgagggaggctgggctagggtgggggatgttaaattggatcccatactggagatctggggatctgcctctctccagctgtgacctcatcacgttgcctaatgtctcagaatgttgcctgtgatatccagggaattggattaaatgcttctgaaggtggattccttgtaaattaaaatagtaatacgtattgagagtggtggagacaaaaatgagttttttcctttattaaggtgaaattcgcataacataaaattaactactttaaagtgaacaattcactgccatttaatattgataatattgtacaaccaccacctctacccagttccatttccgtcaccccaaaacaaaaccctgtgcccactgaaatctatcctccccaaactttccccattcacctttcacctttaagctatcgtaacactaataatgagcgtacaggcctttcatggttttcttattttgaatgtgaatacattgatttgttttctctgcggttgccttattaaaactttttttaaagtgaggtattgccaggtgtggtggctcacgcctgtaatcccagcactttgggaggttgaggcgggcagatcacgaggtcaggctaacatggtgaaaccccatctctactaaaaatacaaaaaattagccaagtgtggtggtgggcacctgtagtcccagctactcgggaggctgaggcaggagaatggtgtgaactcgggaggcagagcttgcagtgagccgagattgcaccactgcactccagcctgtgtgacaaagcgaggctccatctcaaaataagtaaataaataaataaataaggtataacacagcaaagaacacaactgtattaatcttcaaattttaaaaaatggttagtcattatggagacataatagttgtacatattcgtcaggtacatgtgatatttgactgcattaatctgggtacagtttgaatttgatttttacgtgtgtgcgcacatgtgtgaccagtacctagttcagtggctctcagtcatggggtgattatcccctcaggggatatttcgcaatgtggttgtcacagcttgcggggtggatgctactggcatttagtgggtagagaccagggatgctactaaacatccttcaatgcacaggacagataccacacacagaatgatctggtcccagactgggcaccgtggctcacatctgtaatcctagcactttgggagactgaagtgggtggatcacttgaggccaggagttcgagaccagcctgaccaacatggtgaaaccccatctctactaaaaatacaaaaattaaccgggtgtggtggcgcatgcctgtaatcccaggtactcaggggactgaggtacgagaattgcttgaacccaggaggcagaggttgcagtgagctgagatggcaccactgcactccagcctgggtgacagagtgagactctgtctcaaaaaaaaaaagaaaaagaaatatctagtcctaaatgtcactgaatgtcaataggtgatgaggttgggaaaccctgttccagatcaaaggctaggacatttctagttccaggagcccccctcataccacctctcagtctacaccccctccccaaaggaactatcattcttacttctatcaccagccgttagatttgcctggtcttgaaattcatattgatagaatcatgcagtatgttcttttcttgtgcttggctgcttctactcaatatagtattggtgaggttcatccattgtattggtatgtgtgtgttagaagttgttttttaccgctggatagtggtctattgtggggctattccacaattgatccatcctcctgttgatagatgtttaagttgttatgaacattcttgaacattcttgcacaaatcttttggtggacatatggactctttctcatgggcgttcccaggaacggaatccctggctcatagagtgggtgtatcttcagcttcagtaggttctgtcaaacggcttttcagaggttgacaaatattgacttccaccagccgcatataagtggtccagtttctctgcatcctagtcaacacttagaattgtcatctctttcatttagattacaagtcaataatcacattcaaagacaggggatacaaagtttcttttgtgggtgagtaatgaaagtgttctaaattagattatagtgatggctggacaactgtaactatactgaaaaccacagtacattttaagtgggtgaactttgtggtaaattgtatctcaataaagatgttggaaaaaattgaaaggggaggccgggcgcagtggttcacgcctgtaatcccggcactttgggaggccgagccgggcggatcacgaggtcaggagatcgagaacatcctggctaacacggtaaaaccctgtctctactaaagatacaaaaaaaaaaaaaaaaattagcttggcgtagtggtgggcgcctgtagtcccagctactcaggaggctgaggcaggagaatggcatgaacccgggaggtggagcttgcagtgagccgagattgcgccactgcactccagcctgggtgactgagcgagactccatctcagggaaaaaaaaaaaaaattgaaaggggaatgacttttctacaacgtgacttaatgttatcatttaccacttaaaatcactttggaagtcattggttatagcactggattcactcctatttctctactgtcttatcctcttgattcctatcctaaatacagttgtttaaaagcagctctaggccgggcatggtggctcatgcctgtaatcctagcactttggaaggccaaggcgggtgcatcacctgaggtcgggagttcgagaccagcctggccaacatggtgaaaccctgtttctactaaatacacaaaaaaattagctgggcatggtggtgcatgcctgtaatcccagctactcagaaggctgaggcaggagaatcgcttgaacctggcaaacggaggttgcagtgaaccaagatcacaccattgcactccagcctgggcaacaagagtgaaactctgtctcaaaaaaaagaaaaaaaaaaaaaaggcagacctaatttttggctttatatacaactaattgtccatcaatctgagtctaggcttgaatttcaagtcaaaaatataggctgggtgcaatgcctcatacctgtaatcccagcactttgagaggctgtggtgggaggatcacttgagcccaggagttcaagaccagcttgggcaatctagcagaccccatctctacacaaaataataaattagccaggcatggtggtgtgcatctgtagtcccagctactcaggaggtggaggtgggagggtcacttgagcccaggagatcaaagctgtggtgaggagtgattgcaccattgccctccagcctgggcaacaaagcaagaccctgtttcaaaaacaaaacaaaaagtagtttgcatgtacccagttgaatacctttctagagagatcagtataacctaaatgtttgtgtctttggttatcttttcctcttgacatcagtttattatatctcaggtgtttgtattcatttctaggggttcacttctataggccttacctctttggcttccaaatttctcaataaataaatcaagatggctgggtgtggtggctcacacctgtcatctcagcactttgggaggccaaggcgggtggatcgcttgagcccaggagtttgaggccagcctgggtaacatggtgagaccctgtctctaagaaaaataaaaataattagctgggtgtggtggcacacgcctgtagtcccaggtactcaggaggctgaggtgggagaatcgcttgagcccaggaggcatagattgcagggagctgacatcacgccactgcattccagcctaggtgatgagcaagactctcaaaaaaataaaaataaaaataaataaatcaagagcagtggttctcaacctggggcaattttttcctctagggggtagttggcaacgtctggagataattttggttgtcacactggaagtgggtgctactggcatctagtgggtagagaccagggaggctgctaactaaacatccttcaatgcacaggacggtctcctccacaaattttatcaaagagtctatcaaaatgtcagtagtgctgaggtcaagataccctcatcacggatgatttgctatgaactctttggtcatatatgacaactcatttgggattaggttcagccacatgtaatagaagaccccaaataacaccagtttaagtaagttagaagtctactttcctctcacataaaataaatcttgggttgcaagatggcttcatggtatcatcagatgcccaggctgctatttttctgcttcaccatccaagcatttatttttcacacttagacctcatggtccaaggaggctgctggagctccaccatcacatcttaagtttgagctagcaggaagatacctgagaaagagaagggtacaaccacccccttttaaaagagacttcccaagagtcccaaacaacattttgattcctttccactggctagaattagtcacatggcctggagctacaagggagcctggaaaatgtagtcttttatagtgttccacaggttaagaggaagtgggtattaatattgccctttctatgtgtcaactagccacaatgccacaaacatataaacatacataatcttacataaccctcacaataatcctatatggcaggccttaaaaatattatttcataattttaaaaaaatactgaggtttagacagatcaggtaatttttacaaggttgaatagggggtaagtagtggaactgggattggaaccaggagttccggtgggttctgaagtcctacttttcctaatggactacactccctccgtttagactgggagcgataagaacgtgtaaatatggttggaggctgtttgtaaaggcaacattgtttatgtaattgggcttttgagttacccgttcagcatgtgtgtgtatgtaaaagagacaacagttcttgaaggataaatgtagtcctcaattgtttttttaggaaaggcagttttttctccagcaataagtctctcttcctgccttacagaatttaagttgcctgcaaagacaaattctttcaagcaaatctgaatttcctattgtcttacattaaaaaacaaaaaaatcaatgatcccaagtgaaaaatctcgtcacagactggggggggggggtgggggaggggaggggggggagacaggacagtccatggcatggtggcagacactggaataagcaatttacacactgttttaagggtctccagagaaacagaagcaatacgatatatagaaatgtatctgagaggagatttgttgtaggaattggcttgtgaggttatggaggctgagaagtcccacaacctgtggtctgcatgctggagacccaggaaacctggtggtgtaattgagttccagtcctaaggtctaagagtcaggggctgaggctgtaagcttccgtctgagtctgaaccagcaactctgatgtccaagggtaggagaagatggatgtcccagctaaagcagagagagcgaattcacccttcctctgcctttttgttctgttcggaccctcagtgggttgggtgatgcctgcctacgttggacatgaccgcagagttcatcaattcaaacgttagtttcttccagaaacaccttcacagacacacctcaaaataatggtttaccagctatctggctgtccctttaagttaacatatacaattaacccagtcaagccagtcaaattgacatataaaattaaccactggctgggtgcagtggctcacatctgtaatcccagcactttgggaggctgaggtggatggattgcttgagcccaggagtttgagatcagcctggccaacgcgggaaaacctcatctctgtgaaaaacacaaaaattagctggatgtggtagcatgtgcctgtagttccagcaactcgggagtctgaagtgggaggatcccttgagcctgggatgttgaggctgcagtgagccataatagtgccgctgcagttcatcctggacaacagtgtgagaacctctctcaaaaaaatgatagaacagccaccacacacacacatgtgcacacacacacacatgcacacacacacacacgttcacacacacacaattttacttagttcccccagtaaccttgtgggcaagtgtttttcttttgtttttgtttttgtttttgttttgagacagagtttcactcttattgcccaggctggagtgcaatggctcggtctcggctcactgcaaattttgcctcccaggttcaagtgactctcctgcctcagcctcccaaatagctgagattacaggctcctgccaccatacctggctaatttttgtgtttttagtagagacggggtttcaccatgttggccaggctggtctcgaactcctaacctcaggtgatctccccaccttggcctcccaaagtgtttggattacaagcgtaggccaccacacctggccgggcaagttattattaagcctgtttttacagacaaaagaacaagtgtcctacacagtgtctggcagctagaaagggctcaatcgatgttgaatgcatattgcatgaggcacagagaggttgtgatccatgcaaggtcacacagcaggaagtggaattgaacctacatctgtgcaactgtagagaggctcaggaaggtgaagtaacctgtccccaggtgtacagcacatgggaggcttaggactcctgctccccagtcttgcctcatctccactggcaggcagcctactgtatgcaaagcacagagtttgggcgggaaagggagtgaggtgagccgtctacgccaccaccctcttcccaccagagttccagctcccaggcagggctgggcggggaaggcagggctggctgccagacccaggatgccaggactcctcccatggggtgaccccctgagccaatccccagcagccttgcccagccactaggatatgccaggctgtgccccagaagcctcttttccccagattcctccaacttcatgggaacaggaaggttaacatccctggggaggggacctgcagtggggactctggggaagcccctcagagcttgggggatgggcagagagatgccagctctgtgcatgtgtgcgtctctgcctgtgtatataagagattgttctacctgacctggagagggagggtgtgtgtgtgtgtctctgcctgtgtatataagggatcgctctacctgacctggagggtgtgtgtgtgtgtgtgtgtgtgtgtgtgtgtgtctgcctgtgtatataagggatcgttctacctggcctggagggtgtgtgtgtgtgtgtgtgtgtgtgtgtgtttgcctgtgtatataagggatcactctacctggcctggagggtgtgtgtgtgtgtgtgtgtgtgtgtgtgtgtgtgtgtgtgtctgcctgtgtatataagggatcgctctacttggcctggagggtgtgtgtgtgtgtgtgtgtgtgtgtgtgtgtgtgtgtctgcctgtgtatataagggatcattctacctggcctggagggggtgtgtgtgtgtgtgtgtgtatgtctgcctgtgtatataagggatcgctctacctggcctggagggtgtgtgtgtgtgtgtgtgtgtgtgtgtgtgtgtgtgtgtgtgtttgcctgtgtatataagggattgctgtacctggcctggagggtgtgtgtgtgtgtttttgcctgagtatataagggatagttctacctggcctggagagagtgggagggcaggactttcctttggcatttttcagagtgtgtgggagaaaagcatgaactgtgggaagagctgggcatgccacctttgctctgtgaccagaagggtgtctgcgtctgccagctctgtgtgccgaggcagtgaaggggttccatacttgctaaggttttcgagagttctgtctcccagaccctgtgctaatcgcattgctggattgtctcactaaacctcacctccagcccatggactaggaatgattatgatccctgctgtagtggaacggctcagagaggataggacattggcccaaggccccccagcttggatgtgctcgagctgggatttagatagtctggtgccaatgcttatcctcttgtcttttttatttttttgagatggagtcttgctctgttgcccaggctggagtgcagtagtgccatcttggctcactgcaacctctgcctcccgggttcaagtgattcttctgcctcagcctctcaagtagcttggattacaggcacctgccaccacacctggctaatttttttgtatttttagtagagacggggtttcgccatgtttgtcaggctggtctcgaacccctgatctcaggtgatcctcccacctcggcctcccaaagtgctgggattacaggtgagagccaccacacccggctgtgtacccttgtctttaacgcacactccatggtgtatatttatccatccagggagccagtgtttgctgagcacccactaattgactaatatatgcaaagcccttggaaaagtgcctggcacacaatagcagtatgctaagtgttacatattattattatcatcatcattattatttactatgctccagacattgatcctgtgtaggcactgggaattcagaagggagcaaaacagaccaaaacccctcccaaaggaaaagcttgcttttgagttaggggaattaacaacaaaattaatgagtaaaacatacagtatgccagggataagggctagagagaaaatgaagcagagaagcaggcgattgggggtgctggctggttagggctgcagtttaaactgggatggtcagggaaggccttcttggctttttagccctagcctgaaggaggtgagagaatgaggcatgtggatacctggggaggtgcatcccaggtgaatcggcagctccctgatttgatcttgttgcattgggttgccctgcagaaagaccatgtcactaaactgtccctcctgctcaggatgacggtcccctgggcttcctcctcagcatgaagcttcaggctgctctgtctccagcccctgcccctggccagcccatgcagccgtctgcctctctggcattgggagtcccattcctcaaacttctggaagctgtcatggtgccccagtgtttctagtgcacaagcaggggctgccccccagatacagtgggtgtggctttttttttttttttagatggagtcttactctgtcacccaggctgaaatgcaatgccacaatctctgctcactgtaacctccgcctcccaggttcaagtgattcttgtgcctcagcctcctgagtagctgggattacaggcacacaccaccacgcctggctgattttttgtatttttagtagagacggggtgtcaccatgttggctaggctggtctcgaactcctgacctcagatgatccgcctgccttggcatcccaaagtgctgggattacaggcgtgagccacccacctggccagatgtggcttttttcctcccttctaatgaagatgaccctggccttgagtgacagagtctggacaagatgttaaggggcatgttttttggcagagtgcacacccacatgggcagatttgccttgggtgtgagtcatcgataggttctagggaagccaattctggaaaagctgcagacaggccccgtaaagatatgggagggggaccgggcacagtggctcacccctgtaatcccagcactttgggaggccgaggtgggcagatcacctgaggtcaggagttcgagacctgcttggccaacatggtgaaaccctgtctccactaaaaatacaaaaatcagccgggccttgtcgcacacacctgtaatcccagctactgtaatcccagctacttgtcgcacacacctgtaatcccagaggcaggagaattgcttgaacccaggaagcggaggttgcagtgagccgagattgcgccactgcactccagcgtgggcaatagagcaagacttcgtctcaaaaaaaataataataaaaataaaaataaaaaaagaaatggcagggggagtgggaggagaccagggggaggaagaaagtggaacggggttgggggtggtggagaaacaggcagctgtcagttccagtctccaacctgggaaggatatggggtaggaacaggctccgtaggagcagggtccctgcccctcagtgtcctcctcctagctctgcttcaattctctctcacctgcattatctacgtaccaagcgcaggaatgccatgttctcaattttaccatattcgtgtgccacctggaccattactgattttgtatttctatttaaactgagtcacctaaaaatttcaaaaaataggccgagtgcagtggctcatacttgtaatcccggcactttaggaggccagtgtgggaggatcacttgaggcccagagttcaagactagcctgggcaacttggggagacccagtctctacaaaaaaatacaaaaactagccaagcatggtggtgtacgtctgtagtcctagctactcaggaggctgaggtgggaggatcacttgaggcctggaaggtcgaggctgcagtgaggagaaattgagccactgcactccagcctgggtgacagagaacctgtgttaaaaagaaaaagaaaattaaaaaaataataatttaaaagagacacagcggagtgcattggttcatgcctataatcccagaactttgggaggctgaggcaggaggatggcttgaggctaggagttcaagaccagcctgggcaacatagcaagaccccatctctacaaaaaattagccaggcatggtggcacacacttgtaatgccagctacataggagactgggttgggaacatcacctgagcccaggagttctaggctgcagtgagatatgatagtgccactgcactccagcctaggcaacatagtgagatccaatttctacaaacaaaataaaaataaatagccaggtatggtggcatgcacctgtagtaccagttactcaggtggctgaggcagaaggatcacttgagcccgggagtttaaggttgcagtgagccatgatcatgccattgcactccagcctgggcaacagagagagaacttgtctctaaaaataaaattaaaaatgaaaataaaagagaaacttcaggtctcttcaataaatgcaaaaccatcagcacttgctgtaagcagagggtagctagaaaataaatataagggaagcagagccaaccattcaaatgcagtctgagcctgtggcctgcagaaactgctcaatgctgaagctgctctttgtgaaccatgcaagatggccaagggctagagagacaaagataggctggcaccacgtggggcctcatgcctggaaatggtcagcaggtttgaaagagaattgacaaggaggtaactgtctcatttctcttatctaaaaaccaggggatgcaggcagggcgtggtggctcatgcctgtaatcccagcactttgggaggccgagataggcggatcactcgaggccgggagttcgagaccagcctggccaacatggcaaaaccctgtctctactaacaaaaataaataaataaatacaaaaatcagccagatgtggtagcacatgcctgtgtcccagctactcaggaggctgaggcaggagaatcacttgaccctgggaggcggaggttgcagtgagccgagatcactccactgcattccagcctgggtaacacagcaagactctgtctcaaaaaaaaaaatgataaataaaaataaaagccagggaatgttgctagaaccttctgcataggattggtttggttctataatgagatgattcatgtaagagtcttggcgcaggacctggcctggagtaaactcttgataaatggttgtgtgtgcctgtgcccttgttcctctgcttacacaggaattccaggagaactgacatggtgcctttttttgtggccctgtcccccacccatgtgctgtacatcaaaggcatttaataaatatttttaacaggaggtgggagggacttgagttctgtgatgctgacagtgaccatttgtctcacttgtagccagtactcgtatgtgctcaacaagtgattgttgtgtaaaaaagcaaacaacagagtgtaaagtccagcagaatgtccactccacaaggacagggttttccagctgttgtggttactcggatccactgcctagaacagtgcttggcactaagtaggtgctcaacgaacatttgttgcactgacatatgaatcaatgactctgtggatgaatgaatgaatgaagaaaagattgagcttatgaatgagtattagctcttcctttcccagacccaggagacaggccttttgtaaagtttcaggtccccatcacaggctgactgagccctaagcatggtgaccaggaaatggagaaagtgaacaaagaaagagacaaggtgggctcaggtctctggcctgaggcatctctagatttccctagcaacagcacctactggtggaggggagcatcctgggagctgccctggatgggctcagggtggggccaggaaggcgcgtaccacaggtggctgctgctttttttttttttttttgagacagggtcccactctgtcacccaggctggggtgcagtggcgtcatcacagctcactgcagcctcgacatcccaggcttaagcgatcctcctgcctcagcctcctgagtagctgggaccgccggtgtgcaccaccacgcccggcttatttttttttaaattttttgtagagacagggtctcaccatgctacccaagctggtcgaattcctggactcaagcaatctgcctgcctcagcctcccaaagtgctgggaccacagttgtcagccaccgcgcccagcccactggcagcttcttatcacccgctgaaccctcagtaatgtcccgtccaccccagcaataggctcttcaagtagggacgcctagatggtaggggctgttttccatgacagggcaaacactgggcaaagtggcaccaaggagcatttttcatctatataaggctttattttcttctgcgctgggctgaagtggtgcattctaagggttgtacatcccacccactgcccccacaaaggggaggtttctgaagaaaatccccagggcttccaagagaggtgttgccgcattgagtgtttatatgccactcacattctgggcacagaacattcttatgggataatgtttaaccagcgtgtgggctgagttgctgtggctcacagaggaccaggtgaagggctggcctccttcctaggtgggctctggaggaggctgggcctccttgccctcccataacccagcttctcgtcttgactccaccagtaggaaacaggcatccttttgtcctctttagggagcaaactgctatctatttttcctggattttttcttaagctaatacagaagccaggactttgattctttgaaaaaaaaaattctgttttaagcaatttcttggtgcccataggttatgggcccaacctcattcagtcattccttgcatattaagatgtgtgaatgttttacagcttatgagaaaggaaaaaaagcaaagtgactgtaaaatccttgaaggcagggactgggtgttatacttgcaatcccacctcattcaggagcaatttactgtgtaatcagttttcccctatcttaaaatccgagatgggcaggattctataatttgtagggcaggttgttcccaaatttgagtgtgcacaagagtcactggggggaagctggttaaaaatctagatttccagatcccactgtgattcattcattcaattgatgtttattgagctactaccataagtagggtttccagatttagcaaagacaaatacaggatgtccatttaaacttgaatgtcagatcaacaaatttttttttttttttgagacagagtcttactctgttggccaggctagaatgcagtacagtgttgtgatcatagctgagtgcgacctcgaccttctgggctcaagcaatccttcctcagcctcccaagtagctgggattacagatgtgcactatatgcctggccagtttttcttttttttctgtagagatggggtctcactatattgcccaggctggtctcaaactccttggctcaagcgatcctcccacctcagtgccccgcaaagtgctggaattacaggcactaagacactatggccagccaacaaattattatattttttaaattttatttagtttttgagacagagtttcactcttgttgcccagtcttgcagtccagtgcaatggtgtgatcttggctccctgcaacctccgcctcccaggttcaagcgattttcctgtctcagcctcccagtagctggaattacaggtgcttgccaccatgtctggccaatttttgtatttttagcagagatgggattttaccatgttggccaggctggttttgaactcctctcctcaggtgatctgcctgctttggcctcccaaagtgctgggattacaggcgtgagccactgtgcctggccaaattattattatataggatcttgctctgctgcccaggctggagtgcagtggtgcatcacggctcactgcagccttcacctcctggggtcaggcagtcctcccacctcagcctcctgagtagctgggaccacaggtgcaaaccaccacacctgactaatttttttgtattttttgtagagatgggttttcactatgttgcccaggctggtctcgaactcctgggctcaagcaatcctcccacctcagcctctcaaagtgtttaggattataggtgtgagccattgtgcctgacctacaaatcatgttttaacatcagtatgtctcatgcaataactgggggggcttgcctccttgcattcatgctactataaccaagtaccaccataggctaggtggtttgtaaacatcaaaatttatttctcacagttctggaggctaaaagtccaaggtcagggtgccagcatgatcgggttctggtgagggccctcttccgggttgtagacagcctttgtatttcttcacctggcagaaagagagtaaagtagcctcttcttataaaggcactaatcccattcatgagagctccacctcatcacctaatcgcctctcagaggccccacctccagcacactgggacagattaagctttcaatataggaattttgggggaacacagacattcaggcagtccattacagaacatacacgagaaagtgctttgttgtttatatgaaattcaaatttaactgggagtcctatagtttaactggtaaccctaatgctgcaccaaacactgttctaggcgataggagaacagtgtgaacaaaacacagcccctgatttctgatagcttatgttatagtcaggaagccatttcctggtgcccccatagggtctggagacaaactgattcatgcagacaaatagatccaggaagaaagggggaagccaggtgaggggtgcagtgatggaggtggctgtccgttttgaatagagtagacagggaagctctttctttggaggtgacatttaagcaaggacctggagaggtgagatttggatgcagtaagtgtgtagggctcaaggatctgcatagataataagccattctggaagaatccgatgtggggatctgcgaacgccactttgagaaaaatgactttagggtttcaagcctcatgtccacctctgatgatgcacttagctgtttacagctcctctctgggcctcagttgacttcatatgtgcaatgggaatagtagtcactgactcactttctcacagggcagttgtgggtatcaaatgacgtaaaagatgggaaaggactttgtaaactgaaaaacgctcagcagggtctcgactagtgccatccattagaaatacagtgcaagccccttgtgtaactttaaagtgtctagtagctgcttgaaaaagcgaaaaatgtgaaattgattttatgttattttatttattttttgaggcagagttttgctcttgttgcccagtctggagtgcgatggtgcgacctcggttcactgcaacctcctcctcccgggttcaagcaattctcctgcctcagcctcccgcgtagttgggattacaggcgcctgccaccacatctggctaattttttttctatttttagtagagacgggggtctcactatgtggcccaggctggtctggaacttctgacctcaggtgatccacctgtcttggcctcccaaagtgctggtaaaacaggcgtgagccaccccgcccggcgtgaaattgattttaataatatgttttatgtaatgcataatactttgataataatataccaaagtgttatttttacatgttgtcaatataaaaattattgcagagatattttataacatttttcttgtgctaagtcttcaaaatctggtgcatgttacgtgcttacttacggctcatctcaatttgcactagccacattcaagggcttaacagccatatgtggccctcggcctcatgttggacagcacaggctatagcatgaatagtatgtgaagagctggcctcattgttttaaaacacagtgtattagtggaaattttgaggtataatcatacagtaaatttttttatatttatattttactttttttttttttaagagacggagtctcgctctgtcgcccagcctgcagtgcaatggtgccatcacagctcactagagcctcaaactcataggctcaagccatcctctcacctcagccttctgactagctaggactatagacatcagctaccaggcccagaaaattttttttttttttagagatggggtctcactgtgttgcccaggctggtctcaaactcctggcgtcaagtgattctcctgcctcggcatcccaaagtgctgggattacaggcatgagccaccatgcccagcctttgttttattttttaaattgacacagtaattgtgcgtatgttttgacgcacaccatgtgtagtgatcagggtaacttgcatttccgtcatctcaaacatcatttctttgtgttgggaacatccactatccgccttctagctatttggaacttatgtttcagtcatcctacagtggcataaaacactggaacttattcctcccacctcgctgtaactttgtatcctttaagaactcactctctatcccccaccctttcccttccccttcccagcctgtagtatcctctgttctactgtttacttctatgagatcaacactttagcttctgcatatgagtgagagcatgtggtgtttaactttctgcccctggtttacttctaaggtggaatattgaacagtaaagtgaaacagaccagtgacacaacaatgtgaatgattcttacaataggctaagtaaaagaagccagactaagggcaacagatcaacagatgatcaccatcagaaagatagttcccaagaagagggggcattccacaccacaggggtccacagggggagcactggggtggctcaggaaggagggagggagggggagaaacgtgggcaggagcctttgttatggtttccatgggaaggacagggtggggcagggtaagaggcttaggaatggctaatgaggatcatttcagtgggctctgggggagagggactgtccctagttgaatagtacctggcctggggtgattagagcaggtgtactgtggcctggtggacagtgaatgcccagtaaaggaggtggttggactatgggctctaggttggttgctttgcatttgaagagtgtgctccagggtgacttgtctgcttatcgctaggttatcactggctaaccctgggagggctagtgcctctagggtcagcaaggcctcagatatcaaagctctagaacacaaaagataagacatgtgtcatgtactcatactgcaagagatttggccaggggcacggcacagcgatccagattggtttgggtgaatatcagtagctctgtcatgtctcagccctgccagcctgcggccagccccttagcttttaacaggaagagagatttcaaggaattgcctgaactgagcttcttcagagcttgtcgctctctgcgactgttctttggagctagtctcgtgctagaagttgtgaaggctttgcctaattccagttgagatgttcaagggacaggatccctttctcctcctttcatgtgattatttatttattagacagtgtctcactctgtcacccaggctggggtgcagtggcgtgatctcagttcactgcagcctcaacctctcatgctcaggtgatgctcctgcctcagcctcccttgtagctgggactacaggcgcgcatcaccatgcctggctaattttgtctatttttcgtggagacaaggtctcactatgttgccccagtctggtctcaaactcctggactcaagtgatcctcccacctcatcctcccaaagtgctgcaattataggcatgagctaccacgccaggcctctatgtgatattactgcccaactccaaacatggtagggtctggggaatttaggggtttctagtgcctgcttataatcacctaagtgtattgggagatgaggagtggtattttcctctcccttggaaataccaggcccctcttggctgtaacgtctcagtggctggtgcttggggaccatgggaggagagtgtggggataggagcctctttcggttaatatcatctctgatgctcacccctcaggccccaccacaacctgcctgtccacctgtaccacctgggctaatccacatgcttctctgaagacttgctcttcaaagagacaagcacaatgcaaattaaaaccataatataccactacatgttcatgagaatggctgaaattaaaaagactgaccacactaagtgttgacgaaggtggggagcaactggcagtcgtgaatactgctggtgggaatgaaaacaagaaacctgggggaaaactttgacagtttctaaaaaagtgaaacattgacctattctatgatccagctattccactcctaggcatttacccaaaagaaataaagtatacatctccccaaagactcagatacaaatattcatagcagctcttatttgtaatagccccaaagtggaaacaacccacatgtccatgaacaggtggctagatgaaaattgtggtctagctatatggtggaatattgtgcaatgaaatgaaacagatcattgatacacacaacaacatgaataattctcaaaataattatgctgagtgaagaagccagaaccccctccctccaaaaacaaatatatatatactgtcagattctgatgctagaaaggcaaactaatgcaccgtgacagaagtgtttatctatgatcagtggttgcctagggtaggcggaggcaggagagatggattgtaaagcggtatacagaaacctttgggagtgatggattcattcactatcttgattatggtgatgatttcatgggtatatacataagtcaaacctcagctaattgtaaacattaaacgtgtaatttattgtatatcaactatgcctcaacaaagctgtaaagcttaaaaaaatctattttttaaaaagtcacgtacagaccagtcatggcggctcacatgcctgtattctcagtgcttcaagaggttgaggcggcaggatcactttaggtcaggagtttgagaccagcctgggcaacagaaagttagctgagtgtggtggcaggcacctgtagtcccagctactgaggaagctgaggtgagaggatcactggagcccgggaggcagaggttgcagtgagccatgatcctgccactgctcttcaatctgagcaacagagaccctgtcacacggaggaggaggaggggaagaaagggggaggaggaaggggggaggaggaagacgggaggaggggagagggaaggaaggaaggagaagaaggagaaagaaaaaggaggaggaggaggaagagaaagaaggagaaggggaagagaaagactgaggaggaggaagaggaggaagaaaaagaagaaagaagaagcatgcataagctttaggggtgggctggtgggagatcagactgtgaggcagtgccagcctccagtcccaaggcagatctgggagcaggcactaggatgcagatgcagaggggacacagaaggggacaggtgggcctggaccctccccaggagtggctcacactctgattgggggacccaacctaccctgctgtgaaccagtctgtctgaggtgtgttagtggagacacaaacctttgcttatgccagagatgtgatttgtttcaattgggaggatgggatgaggcttcttggaaacaatggtatttcaatgtattggtgtcttatttgaaaaatagactgtgagcactggaatagctgacctctgatgagcacttagtatgtgctagggactcttggaaagctgcacatgcagtattccatttttttcttgtcacacacttgatgggagggcacttttatcacctccatttaaggacatggatgcccaaggtcttataggtataggtcttttaggtatagtggtgataccaagatttggcccctggtggtctaatttccaattcagcactcctattattcccaatctgtctctggtgtgtgagtgtgtggatggagaatatattggaatgtacaactgtttgggttttttgttttttgttttttggagatagggtttttgttttttggactccaggctggagtgcagtggtgcgatcatagctcactgcaaccttgaactcctgggctcaaacagttctccatcctcagcctcccaagtagctgggactacaaacgtgcaccaccatgcctggctaacttttaaaattattttgtagagataaggtcttgctctgttggccaggctggtctcaaactcctgggctcaagtgattccaccactttggcctcccaaaatgttgggattacaggtgtgagccactgcacccaaacttgagtatgatttgaaggtgcctttgggacccttatgttgtaaatcattgtcacttatcactagtctaaaatggaaaaggtagacggtattgaacaaatgttgaattaattacccccatcacttgcagatagtactttttgttttacatcatagtcttgtctgtctctttccccagacttccatggttttgatgatgaatctttcaagtaaggcttcactggttgtttctttgaattatcctcttcattaattatggtgaacagggtagaaatggtcaaagatgttgactcactgtggtcttgtataaggtagcagtcacattcacaaagcagatgcccttgtatggaacagcaggtgcatctctagcaggtgaccccatgaagatgttcctggtggagctgatgaatagcttctttaggtggtatggagtgtctgggcaaatgaaatcgaactcttcatgatcatgagttgcactggcacatccttctgatcattgaaggccatcatggcaggacatcactgcctcatttctaggcttctcagggactgagcacatgcaacctcaccattgtgtcctgctgagtctgggaaggggtgtcaagacagcctgtcctcaaagggccttgtcgcagaagagggacaccgtgaccagcagaactgctcacaggtcaagggccactgggtgacaatagggtagagagtggatgtttcagtcacggtcaggtgacatcgtttagtgccagtgtctcagttccgggtgtttgtggttggccaagtgcaaggacagcttccttctggaataaatgcataggcttttgagcccattctttgttcattctctcgttcttttattttttgttgtggaaagtttcaaacacacagaagtagagagaatcatataaaagactcccaccaggtgctgtgggtcacacctgtaatcccagcactttgggaggttgaggcatgatggttgcttgagcccaggagtttgagaccagtctgagcaacatagcaagccccaatctcttgaaaaaaattaaacaattagccaggtgtggtggtgtgtgactgtaatccctgttacttgccaggctgaggcgggaagatcatttgagccctggaggtcgaggctgtggtaagctgcgattgcgcaactgcactccagcctgagtgtcagagcaagaccctgtctcaaaaaaatgaaataaatgaaagactttcatgtacccaacacaaatgttgacatttcaccactcgcgtcttgtatttgactttttctgattttcattgtattttctgttgaggcatcacagtcagtaaagcttacagcttgatggattttgaagatgaattttcatctatgtttatatctgtgaaaccttcagatcaagatgtagaacattctcagaccttagcaggctcttgcctgcccctccctgagatctgcactttcataaattgtagggtacaatggtgacatcatattgggaaaaatatcttgacagataaaaagttttgtcttccttcttgccttcctttctccctcccttcctctcccctctcccctcctccttcctcctcccctccctcccttcttgcattcttatatccttcccttcttccttctttattcactgatctagttattaagagggtaaactctggattttttttttttttaaagcgggctgggtgtggtggctcatgcgtgtaatcccagcactttgggaggccgaggcaggtggatcccttgaggtcaggagtttgagacaagcctggccaacatggcgaaaccccatctgtactaaaaatacaaaaatcaatcctgggtaacacggtgaaaccccgtctctactaaaaatataaaaaaaaattagccaggcatggtggcaggcacctgtaatcccagctactctggaggctgaggcaggagaatggcgtgaaccccggaggcggagtttgcagtgagccgaaatcgcaccactgcacgccagccctggtgacagagcgagactccgtcaaaaaaaaaaaaaaaaaatcagccaggtgaggcagcaggtgcctgtaatcccagctacttgggagactgaggcaggagaatcacttgaacttggggggcggagtttgcagtgagcccagatcacagcactgcactccagcctgggcgacagagcgagactccctgtcaaaataataataataataataatggaaaatacatacagatccagagtttactttcttagtaattaagaaggtaattactaagaaggtaaactctgagtctgtttgaatacacacacacacacacacacacacacacacacacacgtatgtatgtatatatgaaaaaacccagatgaagtgaaactggcttagagattggcttagagattatttcagattaacagtctctgtcaatctgaaaggcctgccttcctccttcccttcctctccctcttcttctccctcactcccttactttgctttcttcctgctgagcactgattggcaactctaatggctattggaggttcagaacaaaaccaaccatgatactggcccgtcttccatgtccacagtgccccggtgacaagaggatacctgaagcggcttctcagggtttctaaccctttttttttttttgagacaaagtctcgctcttgtcccccaggctggagtgcggtggcacaatctcagctcactgcaacctccgcctcccgggttcaagcgattctcctgcctcggtcccccgagtagctgggattacaggcgcctgccaccacgcccggctaatttttgtttttttagtagagacggggtttcaccacgttggccaggctgatctagaacccctgacctcaggtgatccacccatctcggcctcccaaagtgctgggattacaggcatgagccaccgcgcccagcctcaaggtttcttaggaagggtgagcttcctgccctaaaggtgctcaaggccggggaaggagtatcttaagtgcctggctggaggctgacctagctgacttgctccccccaggcccccagtcagaggaggtcagaagggcctggtgggtggtgacacctgtgtgttccctcgcagacgctgcaggagatcttccaggccgagaacaccatcatgctgctggaaaggtccatcatggccaaggagggcccgctgaaggtggcccagacaaggctggagtgccggacccggcgccccaacatggagctgtgcagggacatcccgcagttgaagtaagtgagggaggccagaggaggcaggagaacccctgggaatccaggaacgggaaggggtgagtctcaggagcttctaggtgcactgggtctgaaaaatggaccctccttcaatcaggacatccagtcccacaactcagtagagtgcagggtgtgggtggagttctgagatgcagctcgggctgtaccactgcgtggcttcctcatcactgggagccccaccctgtgcactgtggtcttctcacttgcctaaactaggggtggttttgtaactctgttgtgctctagaaaccctcttgtttcacttgaaagccaaggcaatgaatggtcgcctcccaggtggtggctttaccttctctctccaggcttccatgaaagaggcacccattcctcactcatttcccacctccctttttgtaaagttcttaccatgaagccctggaagagcctcatgagctcctggctggtggatcccacccatcctgctgtgctaaagaggctggtgtctgttgacgaagggctttctcacaggacaggggtcaaaagctcatgccagcccagaaaggaggtttgtggggggtggggggtggggattgtaataggatgatggccaggccaagaaggaacaggtcatcagatatggggattatttcccatgaacgtgctgtatgacttggggcaaaccacttggccactctgttctccccatgctaggggcattatcttagttgtctattgctgtgtaataaagtaccccaaaaggtagtgacttgaaagaaccacatttgttatctcagtttccgtgggttaggaattgggctaggttccttgctatgttgtacatgtcagggtcttccgcaggttgcaatcaagctgtcagctggggctgtggtcttatctcaaggctggactggggaaggttccacatccaagctcactcccatgcttgttggtagaactcagttctttgctggctgttggctggcagccaccctcattcacccatgggtctctccagcatggtggcttgcttcaacaaagcatgcaaaccagaaggacaatgacagtaccagccacaaggatgtcacagtcttttgtaacctaaccatggaagtgacagtccatcactctttctgcatgctcttctttagaagcatctctaggtccacactcaaggatgtgatgccaggaggaccccacatcattgagggtcatccttggagcatcctcctatgggcactaacagggtttccggtggagggggaagagactgagtctggccccatttcagctgctcatttgctccataaaccttattctgcattcactgtgcccagggctgtgctcaccgggtttcatagcagtacttcttttgacaagatactgagttgatatcccccaagagaaaaagattgaaaggaccatcctcaggcttccttgggcatattatttcagccctagcctacagcaagggaagttcaccctgatggctaactgcaatcccttgaacttcttttgagttctttgccctttagtctcactcctaggggagttgggaagtcagttactcctactgttgtcaaatgggaagataaattgaggtccagagaggttgaaaaagctgtcccagtcacacagcactaagccagggcttcactgggcagggagcacaggtcttggtccagcgatggaccctgctccctccatcctggtgtggagaccccactgctagatgtgaaaagatgtcaagaagagagctatcagttaggagaaggaggatagataatcaagaaaaagtgttgggtggtgcccaagcgatgatttttgcacagcctcagttaccgcctgagtaaccatttaggaaatggaaaaagcaggttatgtgttggggtggggtggaggggcaggcaaattgatccaaggctttgaacttgagggtctggggtccctcccactttggaaggccgaggcaggaggatcacttgaggccaggagtttgagaccagcctggacaacacagcaagacactatctctaaaaaataaaatacaaaacttagccaggcatcgtgacatgtacctgtagtcccagctactcaggaggctgaggcagaaggattgcttaagcccaggagttggaggctgcagtgagctatgattgcgccattgcactccatcctgggcaacagagcaacacccagcagacctgctgctggcttgctaggtcttcagccctggaagtgagatggatagggtctaggtcctgggtgcaggagagtgggggctgggctctgctgacctctcttccctctgcccctgcttcttcgatgctcaggctgaaccccagtacctcctgaagtggagggctcaggtgatccctttgcctccccaacgagagtttttttttaattgagtcttgctctgttgcccaggctggagtgcagtggcacgatcttggctcactgcaacctccacctcccgggttcaagagattctcctgcctcagcctcccgagtagctgggattacactcgcctgccaccatgctcggctaatttttgtattgttagtagagtcagggtttcaccatgttggtcaggctggtctcaaactcctaacctcaagtgatccagccaccttggcctcccaaagtgctgggattacaggcatgagccacagtggcggccccgccaggggacttctacagaacagggcttctgggggagttgcctggaggacctactgctttggggcaagctctctgccttcccgtttcccgttcaacagtcataccactgaggaggacagacagaaagcaaggaggtggagcatgtttggttcaggagccgggccgtgtgtgtgtgtgtgtgtgtgtgtgtgtgtgtgtgtgtgtgtgtctgcatctgtgtatgttgtgttttggtttgtatgcatggctgtcttcggaattgagcagatgataggattcaggctgtctcccttctccagtggctaaattgtcccatctgtgcatgatcttccttgtccccgtcctctccattcctgcctttgggccatctttttccttttcctcctataagtggtctctcttctcctgacctactccaatcactagggtcccatccatgcctatcccccagaaagaaagtccatttaaaattgaactttaaaggctaggtgtggtggttcagacctgtaaccccagcactttgggaggctgaggtgggaggatcacatgaggccaggagttcgagatgagcctggacaacatagcaagaccccatctctacaaaaaatacaaaaattagccaggcatggtggcatgcctatagtccaagctacttaggaggctaaagcaggaagattgcttaagcacagaagttggaggctgcagtgagctataatcgtgccactgtactccatcctggggaacaatgcaacaccctgtcaaaaaaaaaaccataaactgaattttaatgaaaattaaataaagttaaaaattcaattccttattcacaataaccacatttcaagggctcagtatccacatgtggctagggttcaccatatcagacaacatagcacagaatatctcccttgctctagaaagttctattggacagagctggtggaagtttccaggctgcttctgtcacttctctttgcttctctctagcccaggcttcccatggggaagttcacccagcttcatgtcctctggtcctgagcacagtttcactgtctcttctccccagaggtgggacccgcagcacagtcccacaaccaagccaccatcacagctcaccttgccgcattcatttcccagggctgctatcacaaattactacaaactgggtggctacagacaacagaagtttattccctcacagctttgggggccagaagtcccaaatcaaggttgctgttcctggaggctctgagagaggctctgttcccttccactctcccagctccggagggctgtcagcaatccttggcgtccctcagcttgtagccgcatcgctcccatctctgccttcgtctccacatggccttctctcctgcatgtctccatgtctcaaacctccctctcctttctcttatcaggagatcagtcattggatttaggtgtcaccctaaatccaggatgatctcatcttaagatcctaaacttcattacagctgcaaagaccctatttcctaataacattacacgcaccagggcttaggacttgaacatatctttctgaggaacaccacccgatccgctccatgtggattcacaataacctcctaacctttctcctgcctctactcttgcccccttccaatctcatcttacacagcagcctggaggttatcccgaaactcgagtcagcatgccattcccctgtttcaaccctcccccgcccccaccccatggcttcccacagcactgagaacaaacccaagccctttaattttgcatgtgcttttctctctctctctctctcttttttttttttttttttgagatggagtcttgctctgttgtccaggctggagtgtaatggtatgatctcatcacactgcgacctctgcctcccgggttcaagcaattctcctgcctcagcctcccgagtatctgggattacaggcacctgccaccacacttcgctaatttttgtgtgtgtgtgtgtgtgtatatatatatatatggacatagatatagatatatttttagtagggactgcgtttcaccatgttggccaggctggtctcaaactctctacctcaagtgatctgccacttcagcctcccaaagtgctgggatgacaggctgcaacctctgcctcctgggtcagcctcccaaatagctgtgattacaggtgtgcaccatgacacctggctaatttttttctatttttagtggagacggcattttgccaccatgttgaccaggctggtctcgaacccctgacctcaagtgatctgcccgcctcagcctcccaaagtgctgggattacaagtgtgagtcaccacgcctagccaaaatttaagttttaaattaatacagctaaaattcaggttctcaattgcatggccacattcaagtgttcattagccccatggggctggtgggtaccatatttgatggtgcagatatagatctttccatttttgcagaaagttctactccacggcactgctgcaacatactttccctcttggccttcaacatgtccagctaagtcttatctttcttctctgctcaaagtcctctcctgggaggcggagggaggaggatcacttaagcccaggagtttgagaccaacctggaggcaaaaaaataaaccccatctctataaaaacttttttttttaattagccaggtgtggtggtgcctgcctgtagcctcagctatttgggaggctgagacaggaggatctcttgaacccagaggtttgaggctgcagtaagctatggtggcaccactacactccagcctaggtgacagagggagatctggtctaaaaaaaaaaaaattaaaatcagctgggtgcggtggctcatgcctgtaatctcagcattttgggaggctgagttgtgcagattgcttgagcccgggagtttgagaccagcctgggcaacatggtgaaaccctgtctctacaaaacattaaaattagcctagtgcagttttgcacgcctgtagacccaggtacttgggaggctgaggctggaggaacgcttaagccaaggaagttgaggctgcagtgagctttgactgcaccactgcactctggcctagacagagtgagactctgtctcaaaaagaaaaaagaaaaaaagtcctcccctcggaaagttctagataagcaaagcctcagaaggagaggggtgaggaagtagtacggggcagcccagtcccagctgatcctgcaaggggcgccagaccttgaagtgcatcacagagatgtctgcaccagaggccctttgtacctgagtcagccaagccattgtctgtggccgctggcagggactatcctcccaggtgagatagctcagattggctgagcaacttaattgcctggagaactgcggacctgtgagccattagcagccaacactcactcgtagcagctggggatggtgccctggccagtaaggaagacctgagtgaggctcttatctagacaaggctggccctgttatcctgtttattaaaaaattatagggccaggcgtggtggctcatgcctgtaatcccagcactttgggaggctgagactggcggattgcctgagcttaggagttcgagaccagcctgagcaacatggtgaaacactgtctctactaaaacatgaaaaattagctgggtgtggcggcacgtgcctgtaatcccagctacttgggacgctgaggcaagagaattgcttgaacccgggaggcagaggttgccgtgagccgagattgcaccactgcactccagcctggatgacagggcgagactccatctcaaaaaaaaaaaaaaattgtgataaaatacatgtaacacaaaatttaccatcagtgacatctggtacattcacgatgttgtgcaaccctcaccactctctagttctgtgatgttttcatcaacccaaaaggaaaccccgtacccattaagcaatcttctacattctccccaccgcctgacctctggaagccaccagttaactttctgtccgtatggctttgcctcttctggacatttcctgtgcatgcagtcacgcaatatttgtccttttgtgtctggcttcctttatttagcatcatgtttttcaaggttcattcatgttgttgcaggtattagtatttcattcctttttttttttttttttgagacagagtttcgctcaggctcccaggctggagtgcaatgatgtgatctcagctcactgcaacctctgactcccgggttcaagagcttctcccacctcagcctctcgagtagctgggattacaggcacccaccatcatgcctggctaactttttgtattttcagtagagatggggtttcaccatgttggccaggctggtcctgaactcctgacctcaggtgatccacctgtctcagcctcccaaagtgctgggatttcaggcgtgagccaccatacccagctgtatttcattcctttttattatagctgaataatctcccattctgtggctcgattacattgtgcttatccactcatccatccatccacagacatttgagctgcttccaccttttggttatcgtgaatagggctgccgtgaacattcatgtacatattttggtttgaacgcctgttttctgttcttttgggtatatacccgggagcggaactgctggactgtgtggtaagtctatgtctaacttatcgaggaatctccagattggtctcctatcctgttttaccatcctgtcttatttcttcctttgtgtacattacccttgacagttctcttgtgtatttacttgtctacctgttctgcctctgccttcccctggagggccgagccttgcctgtcttgcttgctgctgtctctcagtgccaggcacagttcccagtgcacagtgagtgcatctaccttgaaccgaataacctgtgctaggtcgggcaccatagctcatgcttgtaatcccggcactttgggaggccaaggcaagtggatcaactgaggtcaggagttcttgaccagcttgaccagcatggtgaaaccctgcctctaataaaaaaaaaaatacaaaaattagctgggtgttgtggtgcatgcccgtaatcccagctactcgggaggctgaggcagaattacttgaacccgggaggcagaggttgcagtgagccgagattgtgccactgcactccagcctgggtgacagagtgagactctgtctcaaaaaataaacaaataaaaataaatgaataacctgtgccttctcctctgccctcaccccaggctggtgaacgaggtgttcaccatcgacgacaccctgcagaccctcaagctgcggctgcgggagacacaggacacgctgcagctgctggtcatgaccaagtgccggctggagcacgagctcgccatcaaggccaacaccctctgcatcgacaaggagaagtgcatgggcatgcgtaagaccttcccctgcaccccgcgcctggtgggccacacctgagcaccgccctggcgcctcattccgcgctggcgtaaaattggaaaaggctgagaaacaaagtaaaacagtattttgtttg

SEQ ID NO: 65 - DNA, 19 bp, Artificial Sequence
  Synthetic - Human TEKT5 forward primer
aggctgccagctccacttc

SEQ ID NO: 66 - DNA, 20 bp, Artificial Sequence
  Synthetic - Human TEKT5 reverse primer
tgcagtgggaaatgcttttg

SEQ ID NO: 67 - DNA, 20 bp, Artificial Sequence
  Synthetic - Human TEKT5 reference probe
ccagcactggagcctgcagc

SEQ ID NO: 68 - DNA, 18 bp, Artificial Sequence
  Synthetic - Human TEKT5 variant probe
ccagcaccggagcctgca

SEQ ID NO: 69 - DNA, 125639 bp, Homo sapiens
  allele (1)..(125639): GRINL1A Variant Allele (rs4774281)
gctgaggctgcaagtagccggcgccgtcccgcgtcgcccccgcgcagggcgggccccgcacgcttattctgcccgggaggaacgccggcgtccagcccgctaccgaccgccgctgcgggatgctgcgctccacgtccacggtcaccctgctctcgggcggcgccgccaggacgcccggggcgcccagcaggagggtgagtagcgggggcgggagccgccgccgtcccgttcccccatcccggccgccccctctagaggggactagggatgggaaagctcgggagccagcacctggccccgacgccccaccctgggctcaactccccggtcctgtgccggctctggcagtgaccctcccgcttgaggtttcagggggcccaccagctggtaggagagggcttaggggactttatggaattcccagagatttcctctccttcctgcctttctgtcaagccgagtttattggcggcaccagtttaaaaatgaaggaagacatttgtgcagtgtccctaccttgagactcaaaagtaatgaatgtatttaaaactcaaactttccttcttccattaattaaaagaaagatggggtcacttgtgtccactagtgatagggtatccactagtgatagggtaattctggagtggggttagccaaggtgggcaaaccagaacagcagccggccgcccaggagcccgactgtgtgggactccggtttatgtaaaccactttcttctgtctgatttaaatattagcacagtgacaacaatggcagcactgaaagcttgggacagcatctccagggaaggtttccctttggaagtgctgtttctttttgatctttgtggcatcttttcccatctctccagatgctctgtaaaagaaatgctccatctttctaacacggtcagcaccttagagccacagccaggggcttggcttgtggctttttagttcttccatttatcatgatgttcaatacttatcatttggtacctctttgctctgattgagacttctgtaatcgtgtttcctcaagatttaaacaggtggttaagtccaaagcaaaacccccactggttctgtctgcgtgcaggcttggacctgcttatttgcttttacatgccttaagcgagtgatggtggtcaccttataagctgtctttcttagctctagaagaaaggtgtgttactcttgggcatgggccaactgatggattctggggtgtgtgtgtgcgtgcactcaccagacacttaggttgtgtacacaggcgcacacacacacacacacacacacacaccccagaatccatcagttggctcatgcccaaggttgacagaactccagttgtccaatcattagcatcatagagtaagatctacattgggtccaagggggtttccaaccacagtcctggccttactctaagttgggtgtttgtatttttctatggaaatctttctcaatttgaacacaattgcaactgagaaagaatgaagtcactgaaaagctaaccctgagccctgagaggatcatatgtgtgaccagactgcatgaattgcatgaaattctctgtaacttcccttccagaggtggggattagttggggtacctaacctaatacggtgggttgatacaaatgtgactagtatacaaataacatttctgaagattttgggtcaaacgtttcctttggaatatttatttaattataggtgctttgctgtcggacacattgtgacactcttgaaaagactttgccttttgaataagatggcagacgtattttggactggagaactcagggctcgggatcaggccattcagggctgtcctgggtacactggtacttgtttctggaaggaaggtatctaaagggtctagggttctgcccatctttatggtttctagctctgctcatgatttgcagatgttacaagtactatctgtgtgtgtgctggggattgtgtgtgtggtgggaagctgtgagatgttgattaattgatttattgaacattcataaacctttctctgtgtggtaaagggctggcattggggtccgccctacctgtagaggcagacattttcccaaactaacatcaaacaaagtggtgatggttatagtggggtgaagagtttacaaagttctgtagaagctaaaataaaggttcttcctgaggcatcaggggaaggcctctcactaaaggtatgtttttttgagatggagtctcactttgtcatccaggctggagtgccatggcacgatctcggctcactgcagcctccacctcccaggttcaagcagtcctcctgcctcagccttccgagtagctgggactacaggcgcacaccaccatgcttggctaatttttgtatttttagtggagacagggttttgtcatcttggccagcctggtcttgaactcctgacctcaagtgatacaactgcctcggcctcccaaagtgctgggattataggcatgagccacccagccccgcctactggtgatgtttgagtttaatcttgcaggatgagtagaatttgtaggggaattgacattattgggatactgaaaggaggaaataaccatctcaatggaatacttggcatatataatcatgtactgcataaccacattttggtcaacagtagccaggatatatgacggtggttggaatggtaggctatctcatatcgcctaggtgtgtggtaggctataccatctaggtttgtgtaagtgcactctatgatgattacgcaacgacaaaaatcatcaaatgatgcatttctcagagtgcatctccacggttaagtgacacatgactactttatcatgatggcaaattggacctgctttgggacaaaatacctattgtttagaaaagcaggaacgggatgtcctgaaagtaaaattgtagaccaaataatcattggaagtgtacctttcattgaaagttgttcagcaaatactgtattgttctgttattcctctctgatgatggacaagtgatggtcttgaacatgttatccattaaaattgtatttctggttcatccaaagagctcatcaaattgggtactgcaggggaaaccagcctatgtgggtccagatattcaagccaaccagaagtggtggtgacagctgacactgagcagggactcctgcgagccagctgccaagggttatgtggctggctggactgccaccagttagcctttgttcaatggctgccacctgcaatttgtatttccttcttatctgaaatcacctctcaaggaaaaaaaaaccaacaggtggagagagtaatttctgtcagctgataaacaaagctctgaaaggcatttatggatgccaaccagcagaagttgtgaaattaaaaaaacttccttcaaaccagttgtgcactaaaaatagttttatctatggcaacagcaggaagacaaattgactggagaataaccacagccagaagatgaccttggggaatggggggaaacgattttaaaaatattgaccttgcttcatgcttttgaaaggaattttataaatgccagttagtcttgctaaatgggcctttgaaatggaaggttggttgtgtggctgggtcgtgtgctttgcggggaaggcatgtgttgctttatggcttccccacaaagcacacaaccgggtcacacaactgacctttcggcacaatacttactgccgagtatttttggctaagctgttctgatcctgggctgtggaatgatagatctgtcaaggatcttctccagcaccttgctctcttgataataaaagactgttggctggtgttgctgctatcgtgacccgtcactggcacagagaaaaaacaaaacccaacaaggtcacaggataggactatctcctagcctgcccttgctgatatttctttctatttggcaaaggcttcctctgttaaacactggaatgggcctgctagtcattgttccttggctaatgtgtccctctcccatgtcccattgctgcctgactgggctaagttgtgagggtttggaaccaaggcgtcctctgggctaagggcagggcttaaacctgtgccggtcaaaaatgatggttgtaggctcagaaaaagaggtgcccagctctatgcttttgatctttcacattgccttgtttgatagaggatgaacagacctgaattctggagactcgtaaggaaacttgatttcccctagacatttatggagatcccatggcttttctacaaaggatatggaatgtgattttgacccatttgtctctgggggcactgatggagtgctgcgtatgaggtccctgttgtagtttacctatgctgtgcatccatatctgaacaagagacctggaggctggtgtcactaagccctggtcactggggaaggctttgaagtcaattagcctcaaatgttcttgtctaattgagttcaaggagctgtgggcccagggctgactaactagagaccatgttaaatatttcaacccaagatacttctcagcactcatcatgccttatggtcttacggaattccagtacttctccagcacacagaagagcaatacagtggtgtttacctctttccctctttggtgagtgatagttcctaagtgtcaaccacactcctggctctttttcactcttaaaggccggggtgatctttctaaaatgctaaatctagtctcctgactcgtctgcttcaagagcctcctcagtactgccaggaaaaagttcacactccttagtgtagcatccaggccctctggtttggcccgtgcctgtgctgtttcccctccctatatgtggtcttctcagatattccaaatcgtttgccatttccccgagctttcgatgccgttccttgcctctttgcttttcttcatgtttctcctctgatgagtgttgtctcctctaggaagcctgccctgaaacctcaaccctccttctcgtgttcccctagaggcctgtgcatgccaccattacttgcgtcacctgtgattacctactggaagacagggcttaggaaccacccctccccaggcctggtggaataggcagttaaaaacagaaatctcaccaggtcctacgtagaggagccacagttaacattgaattggcaaatggaaaaacaggaagagaagccttgggttaaatccatcccatcacttctgacccacctgggcaggaaacgggtgacaaatacatgggaatgctggcccaggtgaggaggttgacagttctgggaagtcctccaaatattcgagttgcctcatcctgctgcacagttggagcttcatccctttggttcagtcagtggttctcaaccagttatacacagaatcactgggaggcttaaaatagccatgtcgaggcctcatcccaaaccaattaaatgggaacatcttaaagtacagaaaagcatgagtattttttaggaagcttcccaggcgattctaatgtgcagcaaggctaacaatatttctttaagcattactcccttctatagctttcttggaaatgcagacactcctgggacagtgttgcagaaaggtcccttgagccttgtgggatgaagggcagggtggtgatggggcagggagggggagtcctcgcactccaagtcacactggcatctttgtgtgccttcatccacctgtgttttctctctggatcttggcgtttggggcacattgtgtgcctagtacagaacacagccacagaaagcaggaatgttttgtatgcctctgagctaagaatggttttcacaggggcctgcaaaacctaaatatttactgtctggctctctacagaaaaagttcgccccaccctgatgtagataattgggctgcaagttcagggccacagcagagccaagaggtctaatctagatggggcatacactgttccgcatgcagcctgctgcaggctcctgggatttgatccttgtgctgagcagagagtgtggggtctgttccccctagccacacttacaagggccccaccttttatcattaaggggagctgggcagggacccacagtcacaaagtggaacaggcctgagagaaatgtaaatgcacttggctaatttccttagggaaatccatctttgtaaactggcaaacccctgtcacctccctgaatcatcttctccactccctttttatttgagatagatatttttcccctgggtgagccaaggtgcctgaagttgagagcatgatgttactggatccgcagagtaccccgtaggtgagacccaggccctcatctccacaaaagggtcagaaacaaggcctgaggggacccatgtagctccccaggggccctgagttgccaaaaagggttttgttgtgctttttcttgtggaggaaacctgaatgctacctgtccctcccttgctatccttcccaggggggttggtttcaagaaagtgcaaggcactccagggagtttcaggtatattcttactttgttttagttcaacctagaaaaaactacaaaacccaacactgagcgagcgcccatcatgtgttgatactatgctaagcaccgtaggggctatattaagtggtgacggtacaaagcttacttgatcactccccctatgttttcccttccgtccattgtgtggtgcatggaacactggaggcactgaaaaatgaccagttggattattgaaatgaactcagatttgaatgttagtctcttcctccaaagatttgaatgactcctcattgtcttctgactagagccagtgcttctctatcatgcatttgtagattgatagttcagcccctatctgtttgtccatttgcctgtcctacccaggcttaggctgcaggttcttattcttggaacttgccgacatctgtgtgtttggcacagactagaacgccttgcctgatagctgtctgctgttgttatgatggtgggttctccaaacctcactgacctgtaaagtcctttctgtccttctatacccagcttaaattgtatcccgagggtccttcctgagggactttcccatatattcccacctcccattaagattagtgttcttcttcctatattcccatgataataaagaatgtttacagagtgcttaatgcgtgccagaaattgtcctaagctctttacacacattagctaatttaatcctcacaacattcctaagagggtatagtattgttagttctttttacaactagggtaatggaagcactgaagactaagtggctttccaaaggtctcaaagctagtaggtgtcagaaccaatactggaagccaggaagtacatttccactatgatttaaccacaaagctatcctgtctctctacaccttgtattggttattccaagtgttcttgattgccttgtttgggtatatttctagattatgtactccttggaggccagcatttttttttttttttgccatcgtcgtaccctcatagtccctaaaaatatttcacaagtaataggtgctcagtaactgagtaataaagtatgctgagtccagcttcctgctttgatctcctggaaggaacccttgcccccagggacagctggttcggtagcagtggtgttcagggtaggatgcagttcttcgcattgtgcataacacaagccctgaaccagctgctttgggaacccctgggaataaagtgccctacctgcctttcaggcactgccaagcctggggcatctctggagattgtgtatccgagtttcaggagaccatggagatcagcctcgtaaaatgctcggaggtaaggaatgctgccttgatgttactcggggagattttcccatggggagattgcggaaggtgaatgaatggagggaggtagactgtactcggacaactttatgggtggttcaggggttactgtccttagtgcttctgttagggattcagagtaccttttagacctttagaatgtcccccttgctgctcctgaagcagtcctgtggaaggattagtctctttctggatctgtctcttcccgacatattttctcccagtctttgttattactataactactattattattttaatcaaaaccttacatatcttaacatcgttgccaccaacacagaaatctgtttccttaagaatatcttccgcctacatctacacaagttatcagggtatatttaaaaaattaaaatgggattattcttaatgttttgttctgcaactttctttcttccccatggccatacatttggctatcttgtaaggaagatgtgtgattctgttctaagctgggtttaaattgctcctgaacagccagtccatcagtgggtcagtgtttattaaagaaaaactagctttgctccttaatgttttgatcaaagcacctctgttgacaagagtaaacttcagacagggtgctgcagtagcctcaagcgcctgctgcaactgccaaatgtctttgaggtcatatgttttattttacaagttcattttattttatgcattctgtttaccttgtggctttgtatacctcagggtattgctcagtgtgagagcttcatataagggttgcccagctcatcataggaagtgtgttgaggaatatagatgggcagatgaagaatgggctcaagccaggggagggaccatctaacttttgagtgattggacccatgggaccccctttctgaaaattatgaccattaaggattacccctctaaaataatcaaccaaccgaaagtcatcacttacagtgttaatgtctctgattcattgaccaaattgttattttcatggaaacaggactgtgaggctaagcaggtctgtttcattttgaagcatataggatgatgataatatctagataatagtaaaaatatctggctgggtgcagtggctcatgcctgaaatcccaacacatttggaggctgagacaggattgcttgagcccaggtgtctaagacccatgtgggcaacatagtaagactctgtgtctacaaaaaataaaaaattagccaggcatggtgatgcatgcctgtggtcccagctatttaggggcctgaggtcggagaatcacttgagcccaggagattgaggctgcagtgctatgattacaccactgcactccagcctgggcgacagagcaagacccagtctcaaaataaataaataatcaaataaaaataaaaatatctaatattcatagaggcttactatgtgacactctccctttatcccattttacccttgagattcagagagattaagtaactttcccgtagacacacagctagtagatgttggagcctgtgtatgtgtgtatgtgtgataggcatatatgtacgtgtgtgcacacttgtgtgtgtgtgtgtgtgtgtgtgtgatgtggtgcaggagaaaaggacttccttttccctgcagaattatgcatggactagacccagcctaataggagattgttgagcaccacaggtttggattgtctctgtggtctgagttacactttgatgcttgtgcaaatgtcagactggtttcaaccagtctgaggggcctggagccagagagttgcctttctctggagggactcaagattccctactcaagatcagtgttgttgcccaccaggaaagagagctacctggtagtatggcttggtttctttttggccaacatgactgacggtgagctttgaaggttgcttgtaaagttggccccacaagaggcaatgatagccctgggggtcaggccacatctgattccggggtccctgggggatgatgcttgccaagaggaggatgaggatggagagggatcttgaaaccaagtcatgtgatttaaagaactggggttgtttcgtccagaagaaaggaagttcaagggacaggaggactgcctagaaaaaggggaattagtttgcagtccgaggacaaccctgggtccattaggtagaaattctggtgtaagctcagatcagcaagttagaggtgcctggtagcaaaatgcaatgccttggagggtggcaatggtgtacgtggaagtgctaacatgggtcccaaacctgggctccctaacctgttcatggaaaatgaacaggttggtgccacctgtcaggtacatttttgggtgttgggtttcttcaaaggtgggcaggttgaactcaagagatttttgacattccctctagccctgggcttctaggctgcagggtggttttgctaagaggccaccctgtggaccagtgcagatctgtgaacctgccaaccagactgggacgggggtggagaggatttgtttgctagggctgccatgaaaactaccacaacgccattggcttaaacaacagaaatttcttgtctcacagttctggaggttagtggcccaaaattaaggtgttggcaaggttggtttcttctgaggtctgtgaaggaactctctgttccaggcccttctccttggctgttgatgggtcgtcttaatgtttatatgatgatcgccctgtatgtgtgtctctccccaaatttcccactcttataaggacaccagtcattttgatttagggccacacttatgatctcatttttacttgattacctctgtaaagaccctttcttcaaataaggtcacattctgagatgccaggaaggcggtcaggacttcaatggatgaattttagagggatgcaattcaacccatattagggagccaacagcactcccgcgaactgagcccacatggcatttcaggcatgtgatggggaccatgagtataagagctaagaaagtaagccccggagactgcctgggttcaaatctcagctctgtcatttcccagccatgtaacccttcagaggcttagcttcctcatctgaaaaatggggcaggtaagagaatctcttaccataggtttgtggtgaggcttaaatgaataaatacctgtaaaacacttagaagatgcctatacatggttagctattactattattactgttattgtcccctcgtactacagattatagtagtccatttttccctctgttgagtaggaaaatgactttgcccctaagtcacccttcgtcaacagaatatgataaatcacacaaattgtagcttctctcactgagtggtataatgcttttttatttttaacagaaatggtgcaatttagactttaaaaaatcatttaggaacctttatccgatatttcagtgaaattttttggcagcctttaataaactgacgtgagaatctcagtgactagtgacaaatattcatggtgacatagctaattaaggagtcagatgtcttaccaaaactcataagcattatattttcttctcctaagcctttccagctaactgtcttacttttagtctgtatccaacaagcagggacagcttttttttttaaattgtagcaatgtacttgtgagatttaccattttgaccctttttaagtgtatagttcagtggcattaagtgcatccacactgttgtgcaactggcaccaccatctatctcgaggatttttttcatcttcccaagctgggattccatgcccattaaatactaactttccctgtatccttaccccctggtcaccacagttccactttctgtctctatgattttgattactcctggtacctcatctaagtagaatcatacagtatttgtctttttgccactggcttatttcacttagcatagtgtcttcaaggtttatccatgttgtagcatgtgtcagaatttccttcctttttaatattgggtaatattccattgtatgtataaataatattttgtttatccattcatctgtcaatggacatttgggttgcttccaccttttggctattgtggataatgctgctatgaacatgggtatatggacttttttgaaaaaaagttgtgattaaacatgtacatgtatattgtagaaaaattaaatatataggcaagtagaaagcaccctcccttcccaatagagatatccactgtgtatattttggcttctttccctgtaactatatttttgcctatacttgtgaaatgagatcattctatacatattcttatggaaactgagccattggtaaagaaatgtttgaaatagatcaagtgatttggtagtttccttccttgagccccagggtggtgggtgcctgtgctgtaccaggctggcctggtactgtgaaggtaaggctggccttatctcctctatggctcctgtatgatcaggacagtgttccccaatggaagtaggggaaatgggctgtgagaagcccaaggtcatctggctctttctgccccaaatgctgactcctaactggcctctcctttccctctcttctaggcaaatgtttgcagactacggctgaccgtacctcctgagagtccagttcctgagcaatgtgaaaagaagattgagagaaaagagcaggtaaggtatctccgaggcaaagccccaacaagttccagcctctatacccttaacccactctcccatctcctaaccaggccattcccagaggctgggtgtctgcacctctgttgaggagaaggccctctcaaccttcccacctcatctcccgtcttcccagaagacagagagctctccctagccggctctgccaccgacgtgccctgctcttgtttcttggtgaacactatggctttgtgttaccttgaagctgcagggacactggtcttagtgacaggtgctgtggcggggaacgtgggttttcctgaaacagcccaatccagttgcttcaaagggcctattgtgagcagctggcggggctggaacctttctcagcagcttggagcagcagccgggggctctgctcccgcagaagagaggaaaggctggcaggcaggctggtgcagggaaagggcactttcttggctgggggtaggaggcattcggcaaacatttttgtgacagctcctgtgctaagtgctgaggccgtgaagataagtatgtccttgccttgggggaatttgcagttttctgggtgagacgatgatgtgatatttcaggtgttaagatccagccctatatgacggaatctgggaacacagagaagggaataactgactgcttgggaggtgacagtgaagttggaggcttgaaggataaagaggaggtcctgctgacctctaggcctgtggtcctggccgacccattttactcattcataattatggggcacctactgtattccaggcactgttgtatacagtgggaatatagtagggaacaaagcagtaaaccaaatctgtcatccatggaacttatattctagtgggacaagaatggaagtaaacaaaataattaagtacattttatagaggttaggaggtggtaagtgctgatggagacaaagtaaaagaaggggtaggggtgccaggaagtaggcagtactttttcttgagcatgtattttatatgattataaagtaaaacaaaataaaatgatataaatttcataaatggagtcataacatagtgacctcttgaaatacaagcttgctttagagttaaccactaatgtggtcaactataaaaaagaaagcttctcatcgatggctaagtgtttgataatgtccctaagtttaccataggtctctgtctctccttgccctctcctccccactttctaccaaggacagagagctgcctgtgctgatgcaaatgatgaatgccagggaaaggaagtagggagaaaagcaaatgaagttctgactagagaaaggtgaggagtaaaattgctgatctgcctaaaaagagtggatgagttccactaaaaagatccagaaaaacagctagttctgggttgcagaagggaaaagatgagggggatatgggacctctggaaaataaggtttcactcagagatgaatggggtcctagtaaaggacctagcagccagtttgaatgggctttcactggccaaaatgggaacagctggagcatcaaaaagaataatgacagtcatggcttataacacatcgaatattaaaaaaaatccatacgtttgtagtgataattggagaaggggagtagaggcacgagatcagaggataaaatagggaaggctcccttttttttatagaacactagctaataagtttagaaaatctttgttttgtaacctccaggtatactcatcaatagatgcaaaaataagttggtgaaagattattgtaggatattctcaaagtatcaccccagcggattactgattctaaagggacagtaccttcacagtggagtaggcaggcagccagcatttcaaccaagtgatccaacctaacttcaccaatagtggaacgagctgatgttacatgacttctgaggtgattcacctaagaggtgcacatcacatatgtaatattcatgccaaacttgtttaactgaatctaataataaggaaacagaaaaccaaaatgtgggacattctgcaaaacaattggcctgaatccttcaataaattcaatgttatttttaaaaaagatgagaatttgttgcagataagagactaaagagacataacattaaatgtaatgagtgaacctggattagatggtggcaaaaaaaattatataaaagatagagcacatggacgcaggaaggggaacgtcacactctgggggactattgtgggatggggggaggggggagggatagcattaggagatatacctaatgctaaatgacgaattaatgggtgcagcgcaccagcatggcacatgtatacatatgtaactaacctgcacattgtgcacatgtaccctaaaacttaaagtataataataataaaataaaataaaagatatactgggatgactatacaattttgtatatgaactatatattacatattattgaataaatgttaattttcttgtgatgatggtactatggttatgtagttgagtggctctttcagcttctgtgtagctttgaacattctccacagacaaagtttgggagtaaaagtcctaagcagagagtggaagtggtcaggcttcagctgctacacccctgctgatgagcaggattgagtggggccatctgtcactagggagtgtccccttctgtcctcactgctcctctccctgcctgtcccttttagagctaatggcttggtccaagacatgggtctgggctgtgtccaggtgctcagagctgcttagaacactttttgaagaagtggcctaagctggagtgagggacaggacaagggcctggtggcagtacctgttggtacagacggtagaggaattggggaatatagtcttttggagttagacccaagcttcatgccttgggagatgttcgtgaaaggtttctgagtgccaaaactggggtggtaggggctggaggaccctggagggtctgtaaccactgaagaagaatcaagtaatcccaaggaaggagcctcgtgtgtttagctgtgtcaactggagtcaacaaattgtgtgtcagtttgcctatttggcttgaatagtgcttttcaaacttgtcaataggaccctcttttttaaaaaaaaatcagaatgttttactgagccctcatatgcaaaccaagcaaaagtggtactaacgggggcccaagtcctcccagtctccctttacccctcagcccccagacaccctcctgtggttgcttgagaactccaaggccctgaggagcacaggacaggcactgctgggatagcatatgcaccaggatacttcttacaccaggtggaccaggcgtgcagtctaagtgcctatgtgtggcacattggtgactcactgcagaagaactggggtagaggggaggagggtggggctgttgtttccctagggatgaagtccttgggtggtggcagcccttgaagtttctaggggtaactgggaggctgctctgagtgatttcgtcaccatgtcctggccaggttcctggcatgagtcactgagggccagggccatgcactgtcggggagactctgtaggggccacttccttggatgtggtttcaacatggcttcccctccttggaacccatggaattgcaagaggccaaaactctggatgaccctccctggtcacgtaactttggttcctttgaaggggcttcttctgtgtgcaaaggccaggggattggagctggctcagatatgtgagtagaaagttgtaaatggcccgattgacttctgttgcagtgagacttctcaaggatttccagggccctgttagagccgcacatgatgagggcagcctgggccttccttagtctttcacactgttctgggaggtgtttaatattgcggggatgccacgatgccatgggacagctggccatgcatagaggctgctgccagttgggccattcttccgtttgctgttctccagttattggagaaaggaattgctcccaatgtgggtgtgttgtggatggcgtattttgcccatttccacaaaggtgtgtttggaggctgctggatgcaattacaacagagtcagcaccttcttatggagtcaagggtttgtggggtgtatttggaggtttcctatccctaaggcagatgccctggctgcctgttccttttagtccttcaggagacatcaactgccccgacactgctttatgctgaccacagatgagctcccaaatgcacagcttcctcatctttaaagtagacacaacaatgcctggtttcaaattgtaaataagctaatatatgcaaaatgcccaccacagtgtccggtttataatatggattaaagaggtaatgactaaacactgaatctcttccctttgaatgccaaagccagtggccctgggtctttgtttttacccccttagaccttctggagttattctcctgcctgaagctgcctgtctttattttccaaacacatagcatctcttccttcctcataacccttgctgaggccctagccatgcttggagtcccttcactgccatgtctcagtttatctaagtcttccctgtccttgaaggctcagctaaaggcccacttcctttctgataacttcccagacttctatgtgctggggtggtcactcttcccttaacctacaggacacccaggctgcccctttcacttggcacctagccacgtgctgctaagaactccacataggtatagatatatatttttgcaaaatttgtatataacatgtatgtaggcacatacacacacacagagaaatgaggttgagtctttttattctctcttcccaaagcctaggtggctgccttgcacatagtaggtgcttaatgaatgcttattgattatgatgattgagttttatattagcttcctagggctgccacagcaaagcatgaaaaacgagatggcttcaataaccgaaagtattctgtcacggttctggagttcatatgtctgggatcaaggtgctggtggtgcctcctctgaaggctccagggggagaatttttctttgccgcttccagctgctggtagctcttggtaatccttgccttgtggcagcatcgctctgattttcacatggcattttcatgtgtctgtgtccagattttcccctttttatagggacaccaatagggcccagtctgatggctttctcttaacttgacctgctctccatataattcctaggtactggaggttaggactccagcatatctttttgggggacactcttcaacccataacaggttctttgaggaaatcaccttgaattatagtaacaactcagatgaattagctgtgggcttttatttgaatattgaacattaaaaatcattaataatatgggagggaggatgctgattagtttgtgggcacaaattacatgttgagaaattgataaatgtagaatataatgtttataaacaggctgaacattcaaattaaaattggtaatagttttgaaattaagtacctgttgttttcaaagaactctctgaatttatgtatccatattcttatccatagtcatgtgcaacagattcctatgtgtatatgcagggacacacacacacagacagaacccacaccagctattgcagacttagcatattgaatcagggcctcactgcacagttgaattttagggcatctgatctgagttgattctgcgtctttatgatggtaaagtcctttgcaaatagataaaatagcttgaggcagataccgttttaaatagctattaacatcccagctttggaggtgtccttcagtgacctgttgtttttaaagaagctgttttctctctagatctttgagaatgctgagtgagagagagagcagatgcgtgggtatggatgtagagttgggaactttcataacccaataaaatgttgaaaaggaggaagtccttgccagtaggttttatagtcctctttcctttaaaagccttggatgaataagcctgctgagttctcgtccttggcgtgactgtttatacaacctcgcgggctgttgccaagtgagcgagtgtgctgccatgattcagagcttcaggtgggggccgggctgccctttgtgacagcacaccagggactctgcgtgcccctcagagataacagcccctggaggatggggagagacctagagtttgagtcccggcttcctcatgaacccctgtggtggttgggccagtcaggtcatctctaggggtctttgctgcttcttctagcaaatagaaatgttagtctagagccagtgtttttccaaacattcctttattcacgttgataaatgtggaagttctattggtaaagcagtcaaggtgcagcgggtggagctgaaataagatcagggctatgttggctgcctccatcaggcccccaactcttcaccctacaaccttgtcagacacggaggaggagctgggaatagtgtctgaaaacccactggactatacaactcttttccatttttctaaccttctgagactttgtgattcactacccatgaagagaaaccaaggccactttgggggtgaatatttcgctgtcagagccactttgacaactgtaatgagaacagcaaaaagaccaagaagaaggtggacggacagacagactcattcagatagacatgtagagttgagtaggaacccatatactcaaaaatgtaaagaaaccacaccaccaatactagaaactcccagtatctactagtatgctattagcacactaggtgttttgtgtgttttattctgtgtattctttagactgcccactgaaattggtggtatgatccccattttagtgttaaggaccctgaagctctttaaagtacagaaaataactttcttaggggcacacagctagtagatagtggatttgcaattccaactcaggtctgtgacgggccatgttgccatgggaacattgacttgcgtgccttctcctatcagagaaactctgtttaggatatttacattttatcagtcaaggttaccgaaggtgtgtactatacccctgggttccagaaaagcagttcctgatttttttttctcccgtgtattcttcccttttccgcgggggttattaggcctaagcaactattgtctgcgttgaagctgtgtactagctgcacactagtctgcatggaagctgtgcactagcggtacgctagcactcctatcaggctgctatcattacaaatgccactctctttgggacttctgcttggctagaagctttccttttccttctcatcttaagctttgaaaatgatcttttctcctgagtttacttaggaaatgggcactattcagtctgtgagactgtcagaaataactaaattagttttattttttagaaacagggtctcactatgtcatccaggctggaaagcagtggctattcccaggtgcaatcatagcacacgattgccttgaacacctgggctcaagtattcctcctgtctcagcctctcaagtagctgggactacaggcatacaccactgcgcctggccaagtattttgataagccagaggtttcagtttttctgagaatatttatttcccaggctgtggaaaggccctttgggctcagaggtaatgttcatttttgtccaagaaagcaaaacagtgttaagtatgagtaatgacctgggccaaataatttgctgagatagatacacaggttgtacaagccagagcacattcccgaagtgccagcctctgcctgcaagatgggcagggaacccagtggctctgtgctcagcagtcccaggttagctgctgccctctggctggagaaaagaggtctgaagtaagaagttttggaaataacttggcttccagtctggaagtcacacgagtcacattatggcccttctcaaccatattggcagccaggatgtgtgaccagctgcccctcctggctggtggggcgggggactggctgtgttagtctgctattgtcagtttgatgcatgttgagctgcatttctgctcttatttcccctaagaatgctgattgaccaagggattttctttttttgcacagattaatcctcagtgtcaaggatgactgtatactccaaatattccatctttctttttcccttcaaaatgtatttatggagcatctatttatgctgggtaccagagatagagcagtgaataaggcagatgttgtccctggctttttggagcttgttgcattgtaggatcctatcttctcatttaagatttggacaatatcattggccttgttaacgcagactcttcaatggccagtaaatcccttaggagaggaatttaggctgagttagttttctgtagctgctctttctttctaaggcactggctgccagatgtatctttagggaggtcagccatagtatggggcctgtaggtagaatttatgctgtgagtactcacaggaaacagcttaatccagagattctgcgtatgtgttgggagtatggaatgccctttcagttaattttccttctttcctactttctttttattctacactttaattaagccttttattttctttttttttccgagacggagtctcgctctgtcgcccaggctggagtgcaatggtgcgatctcggctcactgcaagctccacctcccgggttcacaccattctcctgcctcagcctcccaagtagctgggactacaggcgcctgccaccacgcctggctaatttttttgtatttttattagagatggggtttcaccgtgttagccaggatggtctccatctcctgaccttgtgatccacctgcctcggcctcccaaagtgctgggattacaggcatgagccaccattcctggccaggccttttattttcaagcaaattctgtctagtattgtttcatgcccaggaggcttttaatagagtacattttttaaaatttgtttttttagtaccaagtagcattataaagaggcttttgatttttaatttaaatttaatttaatttaattttcttgagatagggtctttctctgtcgcccaggctggagtatagtagtatgatcacagcttactgtagcctcaacctcctgggctcaagcaatcttcccaccttagcctcccaagaagctgggactacaggcacacaccaccacatcaagctaatttttgcattttttgcagagatggatttttaccatgttgcccaggctggtctcaaatgcttggactcaagcaatctgcctgccttggcctcccaaagtgctgggattataagcatgagacaccgtgcctggccataaggaggttttaaaaaacttaattttggagagtttcaaacatacaaaatgagactggatcatgtaatgagtcattgatcctctctccagcaccagcaacctcaatacatggccaatcctgcctcatctacatccacgctgtataaggaaataaatatacatcatctgtatctcagcatgtttctctaaaagagactgtttcttaatatcatcataatgctcttctgcctaaaaatcaatacttttcttattgggaggtattttaaaggatacaagaggagagaaatttagccacaaacatcttgctcaacatatcagcttttttctttttttccccgtgttcagtttttgaccaaaagcatactgatattttataaaaatgatagccatctatgctcctagcagcttttctgggtatacatgttgtgaccggggtaaacattaactgtctgttcctccatctaagaagaataacaggtattcacttcatttggaccatatttatgtaccctgagtaattcccagacctctcccaacttctaaagttccctattcattcagcaagtatttattgagagactcattgcacgtcagtcactgttagatctgggaattacggtggaaaagaagacaaagtaggccctggacttgctgcaatttacagttgatagggaagcagggcttccccacacaaggatactgacatacaccaacagtcgctgggctgcagctgtggtgagtgtcgtggggaagtgctgtgagagtgaaccgagaagacctcaggggtctgaagggtcaggaaaggcgttcttgattcttgaggaagtgacatttcagcccagcagtgcagatcgagggaacagcatgtgtgactaccttgaaacaagaaggaggctggctcctaaaggaacagaagggaggcagtgaggcaggtgtggggttggggatgggcaggggaagtggaaagagccccccatcctgggcctgcctcttccaaatggccctgggacctgagagcaggctcttgggttcctacggctggagaccctgggatgctacatggagacgtgagttccagttgttctcctgactgtagcattgtagtgaaaaaagaactccaatttggaaagacataggcaggcacttgcaggctgttaccctggaagaagagaagtcatactatttacacagtagggtcattgtgaggattaaagaaaatatatattttattatatattatatgtaataaaatcacctgacaacaaatttcttccccctcctctttcttcagtaactttcttcttcacttttcctgtcagggaccatcagctccttgggctgcctcaggagtcctctcccctggtgtggctggtgctgatggccctgctccccagcgggtagagtcctggggccgtgcccttcctgggggcgttttatttagaccctgacatttacacaaatgttcaattcaaacataatgcttttttctttttgccaaaaaacattcaaagtctacaaaagaacataaaggaaaaagtgaaatctcattttcctgaggaaactgtcgttagagagctggattgcatccttctagatgttttacatacacaaacacacagtcttcaaacaaaaaatgaaaatttgaaatttatgatttttcactcagtgtatcttgatctctttctgtgtgtacaactttgagacctgggccactcgggagtgttccacagacttcattgttcctggcattgcttgtgttttccctgctccgtggcggcttcatctccctgcttgggccaggggcaggatcctctgtgtccggccacctgagttttcctgcaagccagtccacctctgaaagcctttgctttgcagaaatgcatttcaccaaagccttgtgttgtcattggcttgttttttaggaactgggtggagtctgtgactgaaagatcttgcttttgtttcctggtatttggggagtttcattagagcttttcctcttcctggttatatgtccagtaaattggggataagttaatgccagctcttgactctgctgcaagccatttaacagctcagttacccaaacttaagcacaaatgtaaggatagcatcagtgcctttggggcccagctgtaagggactcagggggaagcatttaccagaaacaagtacaaggaatcacagcttcttgcatcccatctcttcccaagtgtgggaagaagggcaagaagcaatggttgtagtattttcttactttttaaaaagattacattgaaacgaagcaaaacaaaacaaaaaacaagcaatatagaaaggtataaagaacaaggcaaaagtcaccctgatctctagcgcccctaccccatccatggttccttccttagagacctgtaagtttaatcatcatcacatagttttctagacctttctttgattttgcaaactttgaatgaatgggatcataaagtacttaaagtacataaagaacttactgttctgccacaatgaatgattttcaaatgcaaattaaagttttgtgtgttaaaaaatgctttgtgggccaggcaaggtggctcatgcttgtaatcccagcactttgggaggccaaagcaggcagatcacttgaggtcaggaatttgagaccagatggtgaaaccttgtctgtactaaaaatacaaaaattggctgggcgcagtggctcacgcctgtgatcccagcactttggggggccgaggtgggcggatcacaaggtcaagagctcgagaccatcctggccaacatgatgaaaccccgtctctactgaaaatacaaaaattagttgggcgtggtggcgcgcttctagtcccagctactcaggaggctgaggtaggagaattggttgaacccaggaggcggaggttgcagtgagccaagattgcgccgctgctctccaacctggcgagagagtgagactctgtctcaaaaacaaacaaacaaaatacaaaaatgagcccatgtggtggtatacacttgtaattccagctgacttggaagactgaggcaggagaatcacttgaaccagggaggtggaggttgcagtgagccacgatcacgccactacactgcagcctgggtgacagagtgagactccatctaaaaaaaaaagtgctttttttttttttttttttttttttgtgaatacatggcaagaatctctgtgtaaaggcagttgaaaagttagcaggacagcagaattacctttatggaatttgggtttctgtgctgtgggattgtcgaggtacctgggtcagccctagggaaaactgagagaaggtcagtttgtctgaagtctcagtccttgatcttggattttttcttacttctgtcccttccatgttgtggaggcacctactctgtccccctgcatctaaacatagcctgcagtatggggaggtgcttaatgtcagacagaatcacagagccaggcttgaatgtaggtgtgtgtccataagcaagttgcctaacgtctctgaacttcagttttctcagctatgaagtggaaaggacagaaaggacaattgctgtgtcatagagtggttgtgaacattaaatgtgattaggaatatttctagcctatagtaggttttcaacaaatcttaatttccccctttcctgcttgttaagccttcattctataaaggcgtgttaaggcttggacatgttactgtttctcaagggtatttgcatttcaacaatgaccaaaactttaactgaaggaattaagaaccagccaacaggactgggaggatccttttgggctgaagtcacaccacctcttcctggcttttcagaaatatttcatgaatggtcacaacaggttatgtactaacactacccccttttcttagaacttggccccaggaccagccctaccctcagaggacagtttggctgctagatgactgccagcctcaaccttgtgcattgtatttagtgatgaggttgaagtcatatggagaagctgggataaggggaaagacagcattattaagagcatgaggtttcaaatgcttgctcttcttactaggacaacgcaagtccgtctggtatctttgtgggaattactcttaggtgagtggacaggcccttatatacattagcaaacggtgctcttcctccggggtaaaagcagcccaagcctatgccaaatcaccttggtgaacagagactagatgggatttttgctccctccatctccactgccaggcaatgagtgctgggcacaatttgcataatcatacacagtgggcccgttattacaactgtgcatgaggcctaaagagtcattattctttttttcttttcctactttcttttagcttcttgacctgagcaatggagaacctaccaggaaacttcctcagggtgttgtttatggtgtggtgcgaagatcagatcaaaatcagcagaaagaaatggtggtgtatgggtggtccaccagtcagctgaaagaagagatgaactacatcaaagatgtgagccatttaagagtttttgccccccacctgtattctttttgtagcatgcaagagaatggagttggaagcattgaagtgaatgtaataaggcattttgaaagaattcttagtgttatcattttggctggaaatgtttctgtgtatcttcatggtaatgttaaagtacagatgtaaatctgcaaggaaggaaaggttgagcttctgctggatggatgttactaggtaagtatactcaggagagcagatggcttcctccttccgtgtagggtttggaggctcttgagtggtttttctttattgcacttaccagtcccacattcatccctggcaagaggaataggaagactgtgggtgattcagatcaatcagttgggttgaaacaaatgctaggaagtcaaccacaatagactttgtccaaccaagccaatcaatgccatttccttgtatttagtagtttatttcctatcttttaagttacatgttcttttgagaaaatttgggaaatataaacatgtatgaagaagaaaataaaatcactcataatctcactattcatccagagcaattgttaacattttggagtattttcttcttctctctctctccatttcttttcattccatcctgtgttcccctagattgactgattcccctcttgaccaaaccacccagcttatatggaagaggagatggcctgctctgacactgatgggctcacattacagaccagtggcttagaaagtgcttgtaagaggcagtgtaggggcagggagtcaacctaggcctgtgagctcacagaccttgcttcgagctccagctctgtgtctggcccagcaagtcacttttgctctgtgcaggcttcagtcctcatgttgagattgtgggggttggctgggctttgatacctaaggttaaaaacacagctttgtgagccccattttattttgtgggttttcagataagatgcaaactcatgatgtcttcgcttttgtgtgagtttttaaaaggaacatttcttgttgaatttaaaaaataataaatgcttagcagaaaatatgaggaaaagccagcaaaattagcacgcatatacataatgtatatgacagccaccaaccttaaactcctagttatcccacctttcaaacataattttaaaaatttattttattgtatattttcgagacagcgtctcactctgtcatccaggctggagtgcagtggcacaatcacagctcactgtggcgacacaatcacagcttattgcagcttctacttccccaccctcaagtgatcctcctgcctcagcttcccaagcagctgggactgcaggtgcgcaccgctacacccagataattttttgtagagacccagactggtctcaaactcctggacttaagtgaacctcccacctcagtttcccaaagttctgggattacaggtgtaaatcactgtgcccggcctccagacataatttttaaccattcagaatattcaattcctgaatttcctgttaagaatagctcagacattttaattttcttgtatttttttctcaaggaaatacatagaccttcctcacttaaatgctccggaggtatggctcctcccttagtaaccttctaaacagagtccagagtcccacattgcccaagacaaaggcaggaggagatgttggctaatcctgagctgtggatgacatgtaccaaagacatgtgccaaagacctggaattaccaccctccactgtgatccgcaacttaaaactaactttcaggtccctcctgccataggtggcttcagttccatccctggcctggtcattgcagtatttgcctttgggagggacatgcagctcaagattccacccactcaccactgggagcagcacaagagccagctcagggccacacatgaaagccgttctgcctgcctagaatgaaaagttgtacctttaacctcattttcccaaaatgtttgtacttcatggcaagaaagtagactctatttttagaattcatgtggggaagtctgggggtcttgactctcccttcccccaaatctccaccaatatccagtaacccctaataaacatgctgtctattttaaaacaatgtgcttcaaaattaagccttccaatactatgtcctaaacacttacattctaaccaaactgctatctttaggcccttcctaaaacagaaattctggagtgtgctggagaaaactcccttgagacttcctgccctatttgagggttcctgagtactttccccatcctagggataccagaagaagggaggagacagggactgtttgtaaggtcttttgttgtgttttgaaagtttttaaggtcctgctagccctctgaaagtagtactgtagagaaacttgaacagcgtttgtgtaaacaagtgtttttgggatcacttgaacttttgttatatttactgccttgcgtgttattggtgattactgaggaactgactttcaaatttatgggctccccagggttcatattttacttccttccattccagatatttgattgctctttggcagtcagggccgatagagggaaaattagaggttgctttttggtttctttggtcctcttagccatgagtctgttaaaacacattctacttgtaaaaacatgtgatgggaaaagggcaaaactttgcccaactgtcatttgagggtgataggtgaatttcaacaaaccattttttcttcagagtttatttggctaattaatatttattatgatagttacatgtaattatatataattttatgtaattaatatatattagcatatatttgatatattctatattaatatatgcctatatattttattatgtatataaaatatatacataataaaattatatatatataaattatttggataattcctaactagtttctaactagttgttgggggtgaccttctcccttaatttcctgtcttgttcttaagtttatttttatgtggggtccttctttctttttcttttttttttttttttgttttttgagatggagtcttgctctgtcacccaggctggagtgcagtggcatgatctcggctcactgcaagctccgcctgccggattcacgtaattcttctgcctcagcctcccgagtagctgggactacaggtgcccaccaccacaccccccaactaatttttgtatttttagtagagacggggtttcaccatgtcagccagggtggtctcgatctcctgaccttgtgatccgcctgcctcggcctcccaaagtgctgggattacaggcttgagccaccgcacctggccggggtccttctttctttagagtttcttaaaagttttagaaatcttgtatgaaaatgttatggcttgatctctaactagtatctttgtgggctacaggtgagagccactttggaaaaggtgagaaagcgaatgtatggagactatgatgagatgagacagaagattcgacagctcacccaggaactatcagtaagtcattatctcagttgcttggagatagggaggcatggcaggctcagagtggtccctcagtggctagtgcctaaagatattagagtatctagtgttctttatcaatagaattacattttaaataaactgagaaaattttatcacagaatgaaatttattacctaaagggaaatttttatggtaagaataatcgtattcatattcaaagcattctcaccaaagtcaggagcaaaacaaggaagccagctatcactattattatttaacattgttcttcacatactggccaaacaagagaaataaacatataggtttaaacatggcataggtagatgtaaaactatcactgtttacaaactatatgattgtatacctggaaagctcaagtgaacatgaaatgatgaaagaaaaactactacaaacaagtaaagaatttgttatttgtagcagggtataaaattttatacacacacacacagaggatataaaattaatatataatatacaaagaggtttcaatatacaaaaaattcccaaaatatcatcaacagaaaaatactacatacctaggagtcaactataataagtggaaagaaacaccatgtgcttagaaaggaagattcagcatcataagatccacattactgtaccattttaatatgacccaataaaaagaccaacaggttttgttttttataagtggagtaggtgattctaaggtttatatagaaaataaataaaaagattgggaaaataatgggaaaaaagagcaacgagagggagtagccttattaaatgttaaaagaaagtgaaaaagcctcagagattgaaacagtatcatagtggcacataaatagacaaacatcaataaaaagtactccagaaatgtacccctgtatatgataaatgtagcatctcaaaaaaggaaggaaaatggactagtcaatatgtgctattgggaaaacttatgtgctgttggaagtcttatacctggctaaattcctaaagtatcaaagatttaaatgtgaaaaataaaacccaaaagtgccagaagaaaaatatgtgtgaattcatttatacccttgaggtaagggaatgccttttcttattatgatataaaatcccaaaaccatgaaaagaaaggctgataactttgacaactttgaaatgagaaactcctgctggtaaaaatgtcaaagtcaaatgaccgggaaaaattatttgtccttcgtatcacacataataggctcattttctgaatattgaaagatcccccacgaatcaagaagaaaaaagctacaactcataaaaataggtgaaagatttgtaacaggtaatgtatactaaaggaaagatggagagagctcttttgtgtatgacaggatgctctgcctcacctcatcgtaagataaatgcgggttaaaaccatcccatgatataatttttatctattagacccgccaaagtgcaagagtgggtcaggacattgttcacaggcctgtgggcaaagaagagggttgctgatgaaaatgcaatttgctattactcttacagagaacaattcagcattatcgatcaaaattacagatgtttagatcctttgacccagcaattctattcctagcatttattctacaggtagactctcacatatgaggaaagacataaggatagatttatttattgtagcattgtttgtaatagtaaaacaattggaaacctaaatgtctatcaagtagaggaaagtggacaggcacggtggctcacgcttatgatcacagcattttgggaggccgaggcaggtggatcatttgaggtcaggagttcgagaccagcctggccaatgtggtgaaaccctgtctctactaaaaatacaaaaattagccgggcatggtggtgcaggcctgtaatcctagctactccgttggctgaggcaggagaatcacttgagcctgggaggtggaggttgcagtgagccaagactgtgccactgcactccagtctgggtgacagagtgagaccctgtttcaaaaaaaaaaaataagggaaagtaagataaacgatgtatctctacaatagaatatatgcagttgtaaattaaaaaaaaaaaaaagaaaaagcaagtaatcccttgaaggggagatacagaaagatgtagacggtgaaaaaaagcaagatgcaagaaaatatgtaggaaaaaattgctaccatttgtatagaacaggaagagaagataaacatatcaggattgttctgtgtgtgcacaaaaagttactaaaaggttaatccagaaagtaactaacaactgtttctaattgggaggcagggtggtaactgagcagggtggtaattttttataaaaatataaaagtaactttatacttttgaaatgtttgcaccatgtgagtgtattacctactgaaaaatttaagaaaaataaccttcttctagtttagccaagctaatgcttgtagacatttaaaaaaatttattattaatattcccaaagataaaagtccctgtctatgtgacgtaccttccataagagttaatatctgtgggaaagaagggcagttacaacagtcatgcatcagagttcaatttatggctgggctgtgagattaagtgcttaagtaacacctagtaccttgattataggagtggggctacgtaaatatatctccctaccccatttcttgattataggagtggggctatgtaaatttatctacctagccccttccttgattataggaatggggctgtataaacatatctacccagcccattcccactggcatgtgggaggacatttgtgaaattctcacctgcttatggaaagtcattctgccatgactgtcagacaccaatgactgtcatcaaagccaaagaattggatttgcaatagatgcataaacaagactctgctcctcgctttccatcaccatctcctacacaccctcattttctcatgctagaattgtcccagaaaccctgtctctctgcctactggtctcctccttctccaagtcatcctacctactgcagccagattaagattgctaaattattgctattgaaacacactgctgaacacaaagctgccacatgctcctgggcctggcttgctgcttcaattctgtctccactccccagagtgcacctcctgctctgctgtgccggggctgctttctgctgctcccagaggccacatggggggccttccaccctcagtcctaactgtatctagcctcttaccaatatctaggtcaagaatggcttctgactcagacatgttaaacacacacacccaacaaagacagcagcaacaacagcagcaacaaaacaactctttttttttttttttaaatgagacggagtttcgctgttgtcacccaggctggagtgcaatggcgccatctcagctcactgcaaccttggctcactgcaacctcagcctccggggttcaagcgattcgcctgcctcagccttccacgaagctgggattacaagcgtgcgtcaccatgcctggctaatttttgtatttttagtagagatggagtttcaccacgttggccaggctggtctcgaactcttgacctcaggtgatccgaccgcctcggcctcccacagtgctgggattacaaaaacactcttgagaattgagtgagaccaaagcatattctctccatggtgactacaaagaacaaggtggctgcagaagttatttcaactgggttctagttctaggagcgccacttctgagctgtttgacagtgagcaaatcacataacttctctgattgttttcttccttacaaaggacaacattctgactcctgcacagtgttgttgagagggctaaatgagggtctgtgagtaaacactatccaaaggaaggtgattcttgcccttctctctggatcatgcagatgttgacttttaatttaaagctttactttagatattgttgaagtagatgtggcttctaacagaagaaagttccagcctaactgaagattgtcgtgaacgtgtagggattgattttgtgtgactgtctcctcgatctgtccaggtttcccatgctcagcaggagtatctggagaatcacatccaaacccagtcgtctgccctggatcgttttaatgccatgaactcagccttggcatcagattccattggcctgcaagtactcatctgcttactgctatgacagggcaacccagcttaatcaagagtggggactgtgcctttgcagaaaaataagtcacagaacatccttagctcatgattcagaattctttaagcagaaccactgtgaagactgtgcccagaagacagtgtaggaaactgaaggaagcatttccaagctgagactctaaggctttgtttttgctctctgaaaaggaaatttagaccccgagtttagtgtgagagatgttgcttgcttcaccagatacccgagtggtcctcagcatcagtgcctaaccccacacgtcagccctcttcctccagtcccagtgccacaggaagtgccacctaatcacagaataacacagacttcactaaggacaatctgtactccttcatggcaagcaatataaaaaaggcctgtaaacacttttttataattagaaattattttgtatcagaaagaatcatggatattccacgtcttgtagtagcagacagggaaacagaaagacccggtatcttatatttgtgaaaatgcatgttgttatctcactttgaggcattgttttcttggttgatttggtttacaggagctaacccttcaagtgcttcccattcttactcttacaagtcccctaacatgcaaattaatttgaaaatgttcaaagcaaagcattgtatgtatttgaaatagcttcccttggtcttcatttccaaatgtatgaacaacagtttttacctctcctccaaatttatttggctcttatctttttatcctcctctcaaaagttccaaaacctatttcaaatcctttctggttctatataagtaattttagataaataaattttcatgttgggattctccacttcccctaattctctgataacagttggtatggcagcagtgacaacagcagggctcggccactgtcctggagtgggtctgggtggcctcgtgtttggggtcatctgcgatgcccatttctggtggggcttctgagtcccacccttttcctggctctcttgagtgtatgccagctttcccctggcctcaggccaagccccactgggtctggtttgctcagcagcctttgttttcccttcctcctgtggtcgggggggcttgccaaggctccctttcctcccctttcggacgctgtctcattcccagcccaccagcaagggctttatctcacctgagttcagacttagtcggtatttgtactacatctctggtttttcttcccagaaagaaaaatatatttgccagtattttctggcaattcttgtgctttgccatctggccaacactctggcatttactgcagaggtcagctgtttgagctgggccagctctgacccaggcaccttgactgattcctagttatcatgcaggctcttagtcctggacagccaaaggagccttatagctaaaaccgctgagagaaacagaaagagagagacaaagagagagggagagggagggggagggggagggggaggggaggggaagggggaggaggaggaggaggagaaggagaaggagaagccatctcacagcaggaaactcaacctggtagaggaagagggctgatgcacggtgttaggcactgatgctgaggaccactcgagtacctggtggaccgagtctgaagagagctggcttcttccttatgcaagaccccagcctcttccactggcccactctgtccactttcattattattgacagggagaccagacccttggtttgattccatagaatgtcagagctagaaagaactgagaggatctcagttttatgaatagacaaactgaggccgacagagagaaatgacatgagcaagatgcctacctagtgacagagccaggattagaaaaatcctggtctcttggaccagagtgtaggtttttgtgtggatacacgagtagaatctgtgaagccagtggggctgggggagtgggtggctggtctaggtggtttctaaagccccttgaagctcaaatgttctgtgactccatgcttccaaatagcttcagtattttctttagtatctaatcacctccttcagaaattctttttcttgattcaagtaggtttaggagtgaaaggcttatattgtccaaagtagaggctgaggaattgaggaagcttcagagactgatcatctagacaagagcacagaggtgttagaaacagtgcccaacaccagggttttcacatcttctaatgtgaaattgtagatgactggggacacagtagaagatgactttccaacggcacagattctgtggaggccatttatctctaaggagagttaaccaagtagaaaccaaagcagtaaatagcaccaccatttttttctttttcttttttattatttttttagagatggggtcttgctctgttgcgcaggctggagtgcagcagtgtgatatagttcactgcagccttgacctcctaggctcaagtgatcctcatgcctcagcctcctgggtagctggggctacaggtacacacaaccatgtctagctggtttttaaattttttttgtagttgcccaggctagtcttgaactccaggctcaggtgctcctcccacctcagcctcccaaagtgctgggattacagtcatgagccatcacgcatggccaacactattgatttaaacatccttgcttcagtgcggcctggagcaaaaattacttgtgcggcttggagcaaaaatcacttgtctgcattaccaaattctgttccttagtacttctttattactacccttctctgcctaagggaggaaggtgaaatgtttgcaggtatgtgagtattctcagtcacattgtcactatcctggcaggcagtctagaagcgcagaagggatagctcttttaagaaaaaagggaggccgggcgtggtggctcacgcctgtaatcccagcactttgggaggccgagtcaggtggatcacgaggtcaggagttcgagaccagcctggccaatacggtgaaaccccatctccactaaaaatacaaaaattagccaggcgtggtggcaggcgcctgtagtcccagctactcgggaggctgaggcaggagaatcgcttgaacctgggaggcagaggttgcagtgagccgagatcgtgccactgcactccagtctgggcgacagagtaaggctctgtctcaaaaacaaaaaaaaaaaaaaaaaaagaaaaagaataaaaagaggaatatctctattctataaagctcgtattttgttttctgatttcattgtggcaatttgggaaatacagaaaaaataaataagaaaatagatacccatagccctatcacatagtgaaaactatcattcagatttcctcctggtctttttccccccagtgcataaacatatatttgaaccaatgcttatacatatttttcaaaatgggattatactatacttactattttcaaaagctgttttttttcccatgtgaaatgatgtattataatacttttccttggaaggactccattttaatccatttccatccatcctaagcagtggcaagtggtgttggcagcagctatgggatggtatgggagaggttttcagtccctccaagctacaggggcagacctcttggccaccatgggagacccacagtccctcacagcacagggtcccagactggcagttgctgtagcctaggacagctaccccagtgcttaatgataaggggatgccccagcatgtggtgcagcccatgtgttttcacgccaccggatctggttttgtttttattttcatcctcacagaaaaccctcgtggatgtgactttggaaaacagcaacattaaggatcaaatcagaaatctgcagcagacgtatgaagcatccatggacaagctgagggaaaagcagaggcagttggaggtagcgcaagttgaaaaccagctgctaaaaatgaaggtggagtataaaagcctagatttattttctatgaacttttctcctctttacttctcccttttctcttcccatcttcaacctttccatttccttttctccattctcttcttcattggatttttttttttttttgagacagagtctcactctgtcacccaggctggagtgcagtggtacaatcatggctcactgcaacctccgcctcctgggttcaagcaattctcgtgcctcagcctcctgagtagctggaattacaggcacgtgccaccttgcccagtaatttttgtatttttagtagagaaggggtttcaccatgttggccaggctggtctcgaactcctgacctcaggtgatccgcctgccttggcctcccaaagtgctgggatgacaggcgtgagccaccgtgcttggcccagtttggggcttctccataaatgcccccattgggcatgcctttcttggcctccagtcccttcaagggctctttagacactcaccatggtgctgttgttatgtaactgagaagacgcttgggatgcccacagatctgggacgtcagaagccttggagatctcttccttcactgtttagattttctttgaggtcccaaggcctttctgtttggcttgacaataaagagctgaggggcacacaaatagctggtacttgggctgtaccccaagtacaatattctcaagaagaaaattggtgggtgactagggacactggggaatgtcccatttggccccctaggctgggagcattccttagctgaacttctaatgccctagaggcattagtgcccctcccaaatttaaactgtggatagacttcctacccggtgacaggagcagatccatgaatggctcctggagggcacttaataaattatatcttggatgaattcctttttatgtaagtctgtggtttgaaaattttgctcagcacagacttaggctatcttatgagtagcgtatccacatagtttattgctcaaagcagaatatgtgagggagtgaaaggtggtactattggtaatttagttagggagacaaactgggaagtgtgggccccttcacaggggtaggctgggtggggaagaggggctgccggtccaccgcccggtctctgtattgccgccctggggatctgctgccagttcacttggcctgccacagccatgggacagatcatctcctctgtatgttcacttctaatagggcagctcttcttttccgtgtaagagttactttctcagtaagagttacttggggggtgaaaaaagtttatgttgctaaaaaagcctgaaattactgatttaagtaatttttttcagcttaggggatttattcaatcattcagtccacaaatatttattgagtgtctactctatgtgtgtgtcctgttcagtcctgttggttccagaggtggcctgtcaccaggcatctggggacatcattaggctgcttggcaatctggctgcttccctggagtccaggcctttaactccagcccacagttgcctgttttagagactgatgcttgttttcatcctgacagtggagttaaaaaggtttctcctactcctcctattttactccccaaattgggaaaaaaaaaaaaagcttcaggaactcagggtatgttacatgacctggatgcagagtgaatgggcctccagggacagagcccttccagcaagctgtgcgtgcactgcaaatggagcacacagcacacagggtctctctcagctggtcataagctctgctcaggactttccactttggaacttcttggtgccaacacttacccagtgatgagaagggagaagtcaagggcgtcaagagagacttgtcacatcttggaaataacatcatgtaacctattgagtttgaagaatgcttcccttttccagagtttaggtatgcagcaaactcagctctctgcaataggcgataacctggaaggaggggatgagagcaaaccttctgcagcataaaatcaatggcgggaagtctgtgtgtgagaacgtggcctggcaaacaggaggcaccagccaccaccaacctaagccctgcccacctgcaactccactgactttttctcacctcctaagccaggcctgcttcagtactaggggtgccagcttagtgttccccatgctaggttggaatgtttccaaaagcaacatttaggaaagcacaagggtatggaaagggtgagtccagatttctcctttgagcttagctggtcttacctagaaactggcttggccaatgcaactgatgagattgcgtagagaaataagtttctaccttttgaaaaagtcactcatgtggagcatacctttgtcctgagaatgcccccaaaattcgtgtgaaatgccacttttatttttctgtggctctgctcacccctcttcctccctttccctgttaggtcttgctgtgtctctctgctgcagaacccagtggatgggctcactacctctgtgagtccccacatgaaatgtgcagtggaagctgccaattcctctgggccctgcaaaagctgtcgttctgaaatgagtctcgttgtaggtggaatcgtcccaagaagccaatgctgaggtgatgcgagagatgaccaagaagctgtacagccagtatgaggagaagctgcaggaagaacagaggaagcacagtgctgagaaggaggctcttttggtgtgtgtgttgtagctgccgatgtaaacttaccgggaattgttggttcattattgttggtgatgtatacgtagtagtgtttattcttagaggtgggtcagtagactcagccatgggtaagggatcaaggaattattcatctgctcattcactcccctcccctcttcccctctgcctttattcatccccgtctctactcagaatagccccttgtctctgtctctaaatacacacctttttctagctcatctgacaatttgccagcatctaagcaaaccctgggcttgcccgcagctgtgccctccctccctccatttggttctctctacctgaaatttcctccttccctatctttgatcttgcctaagctccctaaaagccttaaatgccactctctccatgcctggagtctcttccagtcatggagccagaaccattatctgtccttaggaagctcactcactctctctctgcttttactttggaattcttttatacctgccattagagtggggctgtgcgtctcacatcttggcttttccaggagattataagttcctgaaggcggggactccatgtctggctcatctgtgtccgtagaggcttaatacatgttctgatgattgactgggttttcttgttagtaatgagctgatgtattgcattatgggagaaggatctgggaattctgcattcaattccagatctggttctaattcccttacacttctggcaaatacagtgacattctgagcatctactcaatgttattaaacatttgtaggcctcttttacaccttttggatataaagacttaagggaaaaaagggaaaaaaatgtagtgaggcccattaaccagccacatgatgtatctttattcataggtgagaaccagaaccgtgaggttgagttcatgatctgtgagacactttcaggttccaaggtcatgttttaaagagaaatcgtgatctagcaaggcctgagctgattggatcccggtgagtagcctcggtactccatgcctgtacttaggagggtatatttcttttgcaggaagaaaccaatagttttctgaaagcgattgaagaagccaataaaaagatgcaagcagcagagatcagcctagaggagaaagaccagaggatcggggagctggacaggctgattgagcgcatggaaaaggtaggacacagcgttgggcctattgcccacttgcccaaacttttccctgtaggtccatctgagatacgagaggccctggatatggattcctctcacctccaaaatttgcaattaaaaaaaaaaagacaaagctataaaataaagtataaggaagtccaacaacgttctcatttttcccatgataactattttgatgcttttaaaaaatattacttgtgaaattctttagaaaaattaatattttagcagccttgctttgctggtgccccaggtgtgaacttagtttatccattgaattatcaagccctatttaggtgttacatcaacacagcagccctgttgtttctggggcatgtgtctcaagggttggcttttccttgacacgctggggacttgagagagtagggaggccccatttctctaggtgttgtaagcaggctggtgagtgtggtgggggaacctgaggaaggcgggagctcagctgggataatgaagcctgtctagtgaaagggaagaggccaggaattaagtaggaagtggaggaaggggaggaagtggtgggagaaaggaaagaggaaaagaaggaagagaaggaagagaaaggatgggtgacctttagcaggtgacggctgacttctggacccaggagttcagggccaagtctgtggctggtttctgggaatggctccctggctgcatatgagtttgcagagagcagtgacctgccaagaccctgacattattagcaccctgtgactcattcgggatgccaagaatctccaatctgatgatggaggcagaggtggggcagcaagagcaaggtcactgtcaggcttcatgtgatgctgagaagaggtcgccttagctaatggtgtttgcagcataagcccctgtactgtcccctcataaggcgaggtgtcgccactatgggaactgcatgaaattcagttctgtggagcttcagagctcactgggtgcttcgttttagctctttagctttttacttgggagagacttgggcaaactaaagagtcaattacaatctcccttctaccccctgggaaaacagaatcccatcttttattgaagagtaggtgattggcttagtcaggactaacattagtattgaccagagggggtggtggtgaagattgggcaacaagggagctttctagagcttgagtgagcttcctcccacattattgtcctcctacaacagcagaagatcccagttaactcagatgctctctctctgggcagcaggtttttctgcagcgtaaagaagcaaggtgagccggcagcatagcagggtggtctgggggagatgccgtcatacagagaaaccacaggtagtggtcatgaacataggctttagaatcagacagtctggggatttgaatcttgtgtctctttgtagttgtttgcacttacttggtttttcctaactcagtctccacttctgtaaaatgctgataatggtacttcttattcttagggcttttgtgagcaataaatgagaaaaatccacgccaagtgctaagcatggttcctcgtatatagtaagggttcgatcatttgtggctatgatttttactctgttacgaggttgcctaaatgtctaccctcagagtcaggttgtctttagcacgacccattttatgcttatcttcattgctgtcttgaggttctgaaagtttcttgtctttccccactgattttcacatggagccctcatgtgggatgaatgggtagagccaggaagctggtaaggccagccctccctgccagcatttaggaaacacaaaaccttccccaagtggtgttggcttcttctttagtgattggaaatgtattgtcctttctctaaatcttcctttccatttaggctagagaaatgctctatttattgaactaacattaggtaggccaatttacactgtttccttttcagggataaatctgtgagagcaggaatctggccaaatcgctgtctcacactacgtgaacggcatgtcctaggcagggctgtggcagtgtacgtatcctgctctcagttttggattttgctcaaggacaaaccatgtgcttttgaatggcttctctgccatatgccttagtttactgtttctcttgctgagcactgtatttcaaacacctttttttctgatcagtaaaaatcttttaaggagtgttctctaccagggacccttctggggaacagataatagtctatgccataatctgggcagtggtttcacaggtgtttacaaatgtaagaaataattgtgcagtgtacacttaagatttattgtacctcaatttaaaacaaattttaaaagtgtgctgtaagttagaccttgctctactttatgacagcctttttctttcttgttttttgttttttttttctttttggagggaggcattcacttgtgaaagcttttatcactgttatttcggggctaatgtaaaacttccaaccacataggggcaggaggaatgttctgctcaggccaggccataagaatgtgcatttgctgtagagatttaaaaacagtaacaaaaccccagtcaaagttgatctacctttgttattttaaatatttcagagataatatattcttcctgcttaaggtggactgcttccccacccctttggcctacctcttggtataccactgcttatagcttcagaagttgtggcagttaaattttcaaagatttgcttttaataatttggtagaaaagaggtttggaatctatgtagctagtaagagtttgctgggtggaatttccgaacataaagatgaggaacattagttcttagagaaggacctaaagtaaaataatctcccaattagtgagcgttatttgataaacttgcattttaaggaaatttgttacactaacatctgtaatgtatttttagcacaatttcggttatgacaggcaccatgtttttatgaacatttttcagctttgtccaaagaaatgattccagactcttttttgggcaaacttctaaatatacatatatatagcaaagtgtacaaagtgcacggcttagtgcgcgtatgtttcctattgctaccatagcaaatttccacaaggttagtggcttaaaacaacacaaatgtattatgttccattcctagaggtcagaagtgctaaaatccaggtgttggcagagctggattccttttggaagctctagaagggaatgcatttccctgccttctctaacttctggaggccacctgtactcctcaacttgtggccccctcctgcagcttcagaggcagtagcagagcatcttccaggctccttctctctgattctaaccctgctgcctcctcctccttagaagggcccaactggataacccaggatctccccattttaagatctttaacttaatcacatctgcagaattcctttctccatgtaagataacacataggattcaggaatcaggacatggacatctttggagggccatgaatctgaccacaacatatttttacaagtgaatacacctgtgtaaacaccacaagttagaatataggatattgccagaatcccagagcctcttttcttgatgattcagaaaataataaagaattttgcagtatcacaagccaccagtttaaagtattgataatcagtatttggggctataaattttcactgatcctgggctgatggaatactttggaaaatgaatcttgaatggttttatttaggatgttttgtctctgacccataaatatatctataaatacacaacaacagacttggcagttttgagccttgtttgggctttgctgagcaggtgtgtaaaacccagggggtgtcatatagacttggactccctagtgctagaattgctaaatagacattctctgtcaaacttgggatccattgattaaaatatcagtttctgtttgttttaggaacgtcatcaactgcaacttcaactcctagaacatgaaacagaaatgtctggggagttaactgattctgacaaggaaaggtaagacgtaatgcctttcgtcttgtaatggatttaggttgtggacacgctgtgtttttatgacctcatttgacccttacattttcatttgtgtggttgtaccttattacagacttaagcatacataacattgggctgagagtttccaatatggaacaagtttctttggaagcctccagccacatcctgcagatcatggctggttgttagtgtagtggaacacatcaaatactttcacaagtgcaaaagtttggtctattaatgttctccatggccttgaactccacaggatacaccttgttgatgagaaaactcatcagctgtgactaataccacttgctttggaaaccaatttaaaacatctttctttgtttccaaactttgcttagtaaaaccttgcattatcctctggcagtgagtatataaagccctacatgaaaaacacggaatagtacgctgtctgttctagaaatcaaaatgcagagaggccattcaggggtctctagtgaaggaaaacaaggttgagatgatttgagtgttttgggcaagtgacttaacctccctgagtcttgcttgtgccacatggaaattcatctttaaacgggggagacgggtatgacggtgataacagtgcccatctcactaggttactgttgttaagagaactattgggcttgctgcctgccaaatagtacgtgctgaaaaaatacccatttttccttcctcatttgcaatttcagagttttcaaagttacaggaggcttgctagtcattaacatagtgctgaggcagagatggggcacgggaactagaccaccagacctttcctccagtgcccagccccagcggccccagagaactgaagagtccaagcaatgttggagaataaattgtgctgttgtaaaacaaaagtatgaaatgttttgtgatgtggcttgctctgtttggatgtagagaaggtctttcaacttgtcccacatttgccaaaaataaaggatatgtagagcaactgtgattccagaccttttggtattctgccgttgatttcagatattttattgtgttgctggaccccttcttccccgtcctcccctccaagtaatttactggatgttccaatatgttaataaccccaaaacagagagcttctcagatctgtaaatggtgcaaaaaaattatctctcagcccctggaaaataatcatccttatatgggataaaacttgcaaatgggaacttgaaaaatagtcctgtgctcctctgttgtggtagtttgttagtaatcacactactttgtgtggtcatcacataaagtaagaagaatggatcttagagtttgatttcttgttcttggaagcatttttaaatgtttttaaatttacgtttatttttttaccaaaccttccccaaaagatacatgttttctatttttatttatttattttttttttttgtggagatgagggtctcagcatattgcccaggctggtctcaaactcctggcctcaagcagtcctcctgccttggcctcttgaagtgttgggattacaggcatgagccgccatgcttggcgctcttggcaatattctttaaagctgtgactgttgctactgctgttgctgctttggtttaggactcatttgcttttttctcctatttgtgttaggtatcagcagttggaggaggcatcagccagcctccgtgagcggatcagacacctagatgacatggtgcattgccagcagaagaaagtcaagcagatggtcgaggaggtaagcatctgcaaaaggtcacaggcctgggattgcttcctgtggtggggaagcatccccagaacaagtctgccttgcccctccatttcctgtggctcacaagccgaggtgctcaggccactgccatctaggcccagagtgggatttccccacatgtcccccatggactgatgacgatgatgcccctaaaagaggggtttcctcaggtcaaagggttacagttaagaaagctggaaagtgcagttcataagctcacccactgtgaaaggacagtgatagcctgagtgggtacccacagctcaggggacccaagggggtgatgggcagggtgaatttagcccaggtccctgcactgcctccacagccgtctgtctgtctctctctctctctctcagctaccattcttgtcctttatcgttttctgggtgtgtctttcattccctttccttgtctgtttctctcttttttctccctccttcctcgttctcttctcccactcctgcttcttcttccttttcctttgccaccatcctttctctcctaactgtctctgtaacaggaaaccaagctatacatttactgtttgggcatagtttactattctcttttttctaaatgagaaaacgggtaagttgaacatttctatttctctaagaggaacaaaatttgttttaacttgtgtcaatataatccgcctctcttgtggtgatgttccaaagaagaaagtccgtgctctgtaaagctaatcacatattattgtagttttcttcttgctcaattaaaaaatccgattgaaaaatctgatagaaaaagagcagttagtactaacagggttataagaattcccttgagtctaattctctaacctgcaaagaaaaaaaaaggtttcaatttaatcaaacatttggttggcagtggaaaaatgaaaacacattttccttatattaagtactactttaaaaagttatgttttattaatgaattattaaaattaaaagcatatctacttctaagaaataattcatgtacatgacagacaaatggaagattaaaatatatctattttattaatctctaagatattggggatattaatgttggggagttaaggtcagagaattgtgagtatgggaagggacatctttttttattgtgtgtaggataaacatacacattagataaaagtttgtccgcaaatgagaagtgcagttatactgtgttgaatcatgtacatcttatattggttcacacacaagtttctggggagcagtggaatagcagaggaggccacgcacgcatctttgcaatcgttttgtgcatccaggcaggagcactgcccataacagtaatgcggagggagatcctgccctatcgtcaacactaggtagatgtcaggagtgtattttccaaggaaaagcatcactttgccacagttagcatctcagtgagccttggccgtcggggcatagtttttctgcttttgaatttcacacgcacgaagtctggggcaagggcatcccttattttcccctatgcgagtctctaactgtgagcactacatttctcccacctcaccacaggggggtgtctgtgtcattcttgtatctaatcgttagagaactattgaacaaaacctcatactggttggcttctgattcacttaaacccttacctgtaagaggttaaggctgtaccagaatcagagacattgtttttttaaaagacattttcaaagaagtttagaattctctgtttcctaacttacttccagaatataacaaacctaccaatttgaagagagtgaaggagtacacatacgtacacacatatacatatgtgcatatgtatatgtgtatttatacatgtgtatacatatgtatatgtgtgtgtgtagggatgcatataaagatcactgtccatgctttgcttttttctacctgtgatttcatatcttccagataagcttctctaagctttgatgtggtctgtggtctggaaggcccagtcgttggaaagaaatcaccagctaaaatttaggatgccatcagagttagcaccccctaggggctggctgggtttccacagtgaatgtagaccaccaccaccaccagcaacaaaaagagagagagacactttttattcctaataatttttactgcctgatttagaaagtttgtgtttgcccagcatactacattaacttacataagaaaaaaaggatagcctagaatctcatttgctatagccatttatgtgaatattttttttaaaagttagaaacatggtcaaggggcatggacaggtgagcaccttcagaagagcaagaccaggttggaaaggagttgagaacctgagtaattcagggaactggggaagacatgcccaaggagagatgggagctgaattcacatcttagaaaacatgagggaatatgtctttgttttgtattgtgaagcaaggccaggccagaaccactgggtgacactttcaaagaggcaaattgcagctcttcattcacaacaaagaaaacatttctaatactggctgcactggtaaggcatttagctcttcatcatggttacgttctttacaaagtaagaagttgatttagaagttctctagtgttcctccacaaattctgtgttctgtaaccttaaagactgtgtggaggaagtctggtaacttcagttaagtgttcatcatataaagaattctctattgtttactatgctgtgcctgtttttgtgagctcagccttatcattatgttgcataatgagcaaaatcagcaaagtcgtaactaaatcacttcagatcacttggagcaaattttgaaaaatccggagtactgaattggtcacttgtgaaatgaatcttgaactctgactctagaagagaagtatgttttcatctgtgaactccggctccccaggcatataggcagcctttaagtgtagcggatgttaaggaccctttttcttccctcacatgggtctggaagctcgtcttcatcatagcctcactttcaccatggatggaagtctcgtctccatccattgttggtatcattttggccataatgtccatgaggaaacttagtttttttaaatgatgggcttcttttgtttagctcaaaatgtccaggtgtcactactgcgatccttgggaatccttaaatgttaagcaacatgtttcttctcaccttagtggagtatcattttatcatagtaataataaataataaaaagtaactggcccaggttttgtcatccttagctcattaatgacttgatttccatggtgggagacagtaggacttgtactatgtaggaagggctcatggtgggggtgagcccttttgaaatgaaggattagtatatatcttacggtgtcaaggtcattgagaaaagataatgcaaaacgttttctgtgaaatgtggaaccaagtccctctcactaggctagggctttctactgaattaagtctcctgtcatggatgtcagggggttgggtatctcccccatcactagttcttccagctgattctggctttgataaaaatgagagaacaaagccaaaaaagccccacgtgtgcctcttatagccggaaaatatagaaaaatgccgagggattggaaagaaaaagccctcaaggggaaattaattcattcatccattcagcagatacccaccagcacccgctccgtgctggggctgggtacacagtggggagtcaagcagacatgggccgtgctggcacggatcttacccactggtgtcacccgagttccagggtagtcttgcctttgggttttattatcctgttgaaaagctttgttgggattggtctttggtcctgaatcaagctgcattctttagattgccaggaaaggcactgggagagctgggaggagtgtaaaaagtaagagagcatcctgaggcccccacagtgcccctctgctcacacatctttgagtgtgacttcttcagtccacagagtcattcacaccctctttacctgctctcaccatggctctcctgctgccaaccaaagcagctctcctgccaaggggaaagtgatcttaaggaaaaaatcaactatttgccttccaagagggtgggtttacatttttgccaatgggcagggatattgtttagctgaataaacagtaatttcttaagaggttttttttttgttttttttttttttaagctatatcccagtgcagccattaggcatcctttcattttgtcatgtctttcttttgatttccctttgccatttgtgatataggaaatgtttcttccaacagggtctgaagggagtttcttttcatttgcagaggaggcattttctttagacttcttttgctgaaagcaattacactctaccccactttgctataattgagatgtttaataagtgcaaaggtgcaaggaattgattttctcattagtgcttctccacccaagctacacattggaatcacctggggagctttaagacatgcctgaacctggcagatgggatggaggcagactgagcattgggttttgtttcgttttaaaaactctgcaagtgattctaatatacagccaggattgagaatcgctgtcccggattctcagagcggtggcctgactctccttgctgggtttcatgttcatgcatttggccagcatccctcagaagctcctatgcctgaggtgggaagctgctggtgaactcaataggaagggctcaacagaaagcaagccagggagacagtcaccagggaccaggagcacagaagtgagaaagctggtccaagtctgtgactctctgggcactgtcaggggaccttcacttcttgccagcccctggtcctgggaggattctgtgacagctcactctttttttattttttattttgttttagagacaaagtcttgccctgttgctcaggctggagtgcagtggtgcaatcataccttcctgcagcctccaactcctgggctcaagtgatcctccccactcaacctcccaagtagatcgactataggcacgtgcacccatgcccagctaatttttgtattactgttattattattattattttttatagagacagggtttcactatgttgttcagctggtcttccaactcctggcctctagcaatcttcccatcttggcctctcagagtgttgggattacaggcgtgagccactacacctggcctgacagcctaatcttaatagctgtactggcctggtggtatccagataatacaaacttcccaaaggctatttagacccatctagagagatgttactaaggtgggaagaggtacgcttgttaaatagataatagaaacttaaagggacagaatccaatccacctaagtccttgaaagctggactaccactaagagagactaagggtgattctcatggatcctcttccaactgtgcatgtatgcacgtgtctgcctcgccctgctttaaattattcacttctgtctgtacagaagacgttacacttggccacatggtacccctttagaaagagaaggcaaaaacatcttggttaaataattatattagcaatgaccacttctcaaattcaaggcaaagcagaatattatttgtgattcctaaggaatgattttgaaagtatttaacggtcatctcttagattttttttaaagagtgatgctgtagtcataatgcagcagttccttgggggaaacaaactggatcagggagaataacagatgagtaagaactcttcagagagttgagactttgagtatctggctctctagccagttggccaaacaaggctttacattactagtccctaaatccacatgcatctgcagttagagacctttatgtgtctacaacaaaagatggcctagaaaaatagcaacaagtatggactttagcatcagacaaacctgcctttgaaaagttattagtttccttgtctataaaatagggttaataatagtatctacccaattttttgtaagagttaaatgagatgacatgtataaaatgcacagcatgttaattggatcataagaaataataaatattagtggctgttattattaccacctgtaaatgggttcggctgtgtatacctaaagttaagtgaactaaaagcaaaagtagctattgttgatttcctgagcaatgcacggggctgccctttatctttccctttgggagtcttgttggccacattcaatctttgggtatacttctctcttctcttttgtgctctgtgctgttttctagcttagccatcaatctcttcacaagaatatttatacaaaaagcgatttttaagatttaaatttgcttcatcgcaagtatctgccatttttacatggttcagtcatttgctggcacacaatttaattcaaaactgttgtgtggtgtgctgaaatgtgcaacacacgaaagtacattttactaaatgccctgtgtttagaggatttcaagtacttctcataattggtaattagccaaatgggggtaggggaaaggagccatagcaccaagcccacaaacctaatccactcaattgaactgtctccagatcatgtcgcacgagctcttctccagatttagtctccggctctttggaagatgataagttggtagcctgctctgggttggaagcgattcctttattgttcgtgattagaagaacacttgtacactctctgctgggaagaggtggtatttatctatgatgagccaatgaacaaaacaggaaggacatattatttaaaggaaaatttgaccatgtggggctcttgtttgtgaaaacacccacatactgtcaccctgacttgtacagcctcaaactgcagagtcaagagaactcacagatccacagagtatttttaggaacttgagtagacattgaagaaggaactgcaatgaaaaaggctactgaaaaaccattcagaaagatccaggtggaggcttggaagatgaatccttacttatggaaaagctgccaaagacatctgctaaggagatgggaagagagcttgaagaatgttagtgctctgggaaggaggtgctcccaccagatcacccccaagaaagtacaggagcagccaggtatccatgtggtttggttctatttgtatatgggaggtggccctgaaggtgtccttcctgaatggatatcaatactcatcttaggactcttctaagaggagtttagcttgcttctatcaccatcagcattttgcctgaattggttcaaccaacttcacgaaaaggagtgtatctgataaagagaaatctatctggctgaaatatgttgaactgaaacatccttcatgtatgttttatttttatagaggtctttcttgagattgctgcaggcattggtgttttatcagaacatggcagttttgctgagaactagcagtagtagctgcagtcatagcaatgggtggcatgagtctacataagctgggagatggggctcgtggagtgagtgcgttcagaggcccagtgtccctcagacgttggctagttctccactcctatcactccttcatggcaaagcaggcatgaagctgctttcttgctaatatttgcctttgctttcatttagatgcttctacccagcttaagcaaggagggaggggatgggaaagaagcagatgaatacttttccgcattagttattaaccattaatattgttcacctgtgcacggtgctgtgtttagacacagatccccagatacgatgctgggtattcagacttccactagggagacagaggcagatttgagaatctcatctggatgttagcttagtgttgttacctacactgttttttagggacgcctttattgctgtaatgtttttctaagtctctggtggaaaagtcactggcatttgttctagcagcattgattcattgccaagttttaaaaaaggaaataattaagagaatgcaatgacctttagagaaaacaggtcacccatgtaagtcctgctttcagggtggtgtgctttcttctgcttttagagtttcttttctcttttgggctatgaaccgtacctggaggccaggcaggccttattctggagcagatagtgagtgaggttcctagagtactgcatagcctgagagtgcctcctaagtggatgccctccacacctcctgcacttggccctggccctgggtcctaggctcattgttgatcttcttagatctgggttccttgcattgcaggacctacctcagcctgctcttgtctgcctttgctgatgcccctcaattcacctctttcctgcctgtactgtgatatggtgtgaacttgacttatactgcttgtgaaacctgagtcatgtgctgaaatcctgccccgccaccgctttcctcccttaactggatccttagccttggactccaaggctacagctctgtctcgtggccactcaagccccacccaaaggaggtgctactcaaaagtttgaggcaggagtgatttattgtgaatgacaatgttatagtttctaattctagtgtttagcatggtattattccttatttattttaaaatcttagacaatttatctaaaatgtcaatttttagaaggtatcagcacaattgtggcagccttttttctgtatgtgttatatgtattatttaaaaaagcaggttcattctatgacaggtattggtttcggtattcacaatataaattgtcttttcaagggaaaggatattttctttggaaatgtcattgaatctatgttctctttattgaaattgttctaattgactttgaactgtttctcagacacctggtgcccagtttctggccatagaaactatgtgaggctgagtaattcatgttttgggtcactaccagtcacgaatgcttctctcattccaaggctatgcatatggatgtcacattcccatgtcaatcatctctggaaggtattattcgcccagttttttaagcatgggaaactgaggcttagagtcttaaaaaataagtagctggcagtctctcagcaaataatgatggtgctgcactacagacccagatctgtgactccaaagtcagcctttgttcttttcttcttgttacttttaattggaaaaaaatttaaattgcaaaaagttgtagagtgataaaaacaaaaatccacgaatgctcttctaggattaacaaatgttgccattttggcacacttgtttctgtttttttttttttttttaaagaaaagaacacatcacagataaagaagaggttctctttttacctgtccctgattctgttccttttccttctttcaccctctcttcttctcagaggcagtttggtctctaggccatgccttgatgattttactgtgtatatatatatataaaattagtatgtggcttagtttgtgttttaaattttacgtaaattttaatttataatattaaaaataaattgtattgtacatattttgcaacttatttctcagttttgtttctgctgttattccacatagatctggattattcatttcaatggctaatatccttttatttgaatatattgtaacttatttatcctattgatagacatttttattcttttacaaacaataccaacatgtctccaggcttctctaactaggaagtatacgtaaaggaggaattgctagggcatgggattggcataatttcaccttttctagatattgcccaatcgctgcccacagtgcacatacctttccaccagtcacatgtgagagggcagattttccaaatgctcatcaccacttggcactgtgtggactataattttggccagttaggaaatggcatctcattgttttcatcttaatttgcgtcagcctgattactcattgaaacttgtgaggttgagaaacttttcttaagcttattggccattcaagtttcctcctttatgaaatggttgttcatgtcatttgctcatttttatattagattgtttttcttttttccagctgacttgtaggaactctacatcttatcaatattaatcatttatcgaaaactatttgggtgccattatcttctcctagtcaatgttttttgtttgtgatatcttttataatatataagtttttaatgttggcagaagtaaagttaatctttttggctgtgttgtgtgtcttgtttgatgtaaagatagtttctgtaatagttttgcagtttgattgttcatctttaggtcttcaattacaacctgcacatccatcccctctatcctctttcttactctgtttttctccatagcacttatcatccaataatatgtcatgcactttatttatctgttttgcatatatattttgtctgttacctgtttccttccactagaatgtaagtcccatgagggcagggacttgcatctattttgtttgtggttgtatctctaacacctgggatagtcactggcaaatgatagttgctcaataaatatttgttggacaaataatgatccatgtagaatttatttttgtgtatcatatgaataggactccttttatttttggctcacggaaagcttgtttctctaatagcattgccgtactgatttttttcacgtcgctttcgtcaagctggagttgtttcccctgtgccattgtctttgaacaatcctgttttcctgcccctctgctgaagactgaaggaaactcattccttgggcttaagagtgggaataaggatgaggaggagccaggtacaatttatggggagcttatgggacagttggtacacgtttaagaagagcctcttatgagcatgagtgcaaaaatggacatgagttcctgctctcagaggaccttctggctgacatttaaactcatttgaacttgaggcagaatgtcataggtgctggaaacacagaagctgggaaacttagtggttaagttcataggctttgagtaaattcagtctgcttttgcatcctgcctctgctactgactaggctttgtatcttgagcaaattatccaagattcagtttccttatcaataatatgggaatggtcataacattacctcctcaagtggtagttatgaggattgactgatgtgatgtgtgctaaatgcttagcatagttcctgccaggacaaactaattctgatgtgggtggagagtctttagggaggaggtagtgtttgaccaggccttgtaggatgggttggatttttctaggcagggattgaatgggtggacatgtcagacaagatatagaataaataaaagcaaaaacatgcagaccagaaagtatagggtgagttcacagagcattcatctagtttggatggtacgagggagtgagaaatgaagaggctagaaatataggttgacaccaattgtgatggtttattagcaccaagccaagaaggatgtccttcatcactctgctcataattcctcaatggctccccattgcctgatcagatatgagctccagagtggtggctctggccagtgggtgctgggtgaataggaggggagaggagcacggaggacagcaagaaggctccaaggagagccctggctagtgctagagagtgtttactttccatgcacttgaactttaggaagcgcttccaaaatgcaattttttagcatcagctttgtgccagatgtggagctaggggcttccatatatatgtattacatgaatttgaagcagttcactcccttggacactcctgttcaggatttggtgttttgtctctgaaactgaattcatcgagaaaagcacaggggtaaataagcttcatccccatctccattccatctgcctcctcttgaatcatagagggaaaaaaaggacagcctaaagaattagggccccagcagatcctttgtgacagaagatatcacatgtcaaccttcctcccagccctgccaactctccaggccagctttgcagccataggttgtcatcactgggaggatggaagcaagcaaacctctgaacagggtgtggtgtgaataggacagcctgggccttgccctcacagatgcttacttgggtcgtaatatcagccctatcagcatccagatgattgtgaagggagtgaatgaatgatgaaagtcttggcacctcagtttcatggtctggtggggataaccacatagggttgtttctgagaatcgtgagctaagccagcaaagttcctggtagcttgcatgctcctcctttcttccttctcagagaatgtgctcagattgggaagcagtttaaccgtccttccctgacatttgtacagccaagtcatgtttaggtacccgggggagccagagtgctcctcctctccttctggagaagttgggttatctttaatataagatagaaatcaaaccaaattacattattttacctcagaaccccgttgcaaccgatccttttgaatggtatagttctattattatatattacttcaaacttaataggaaaaaattgattaaaatatgtgccatgttcatatctagcctggctgaatgccacaagacacattaattgaaaatgaatttccacaaacccaatcaagcatcatgaagatgaaaaatgtacctttttccctccattccttcattgatttttcattttccccactcagtgcttcatttagcaatttttcagtttcgttttgttgtggccttaattcatttcctttactcccccccaaatgagataatgtaccattttcttcatgcttattaaactcttctttcatgctgcattagtgcagggcagattctgatcttgtcatatttctctatgcattattttttttgttaaaaataggctgagcttttttctttttattcttacattttgtggtggcttttatcaaagagaatggactttaaaaaatacagtaactatgaaattacgatgttacaggacttccaaaatagaattaaggaatgctatgcaaaaataaaacactttttctgaggaagagtgtaaaatatcaattattctcatagtcacagtgggtatgtggggaccagacacaattcctcttttgttaagagaattggaaacaatggtttaccagatcatagagggatcaagaggctgggttaaagacacagcactgtcaggaaaagagcaggcagagggagacgacggctgaagcccaagtgagctctagaaggttctgtccctgacccagtcagttcaccatttccctggatttctaggggttttgaaaacaataatggggatcttcaaagtatttccttgtaaaattttcaaattttcaaataacgtgatggcataaatttcccctgaaaaggctgtaagaactcacaataaagtatcatattcctctcttttgacctagaattcatagccctagtaatctcgttttgattagatgctttgattggcagttatacatctttgataacattttcaatgtgaaatgaattattctttcgttaaagccattttaagcagaatgtctataaatgagggcccacgagaaggaataacaaagcaggggtgttggggatggtggctggggagctttggtgtatttattaacctgtggttgagttttgcgatgtgtgcaagtacacacagccccgacactctgattttgaaaacaatgaaatgaaaatgaaatgaaaacattataaagaaatttcaaataaaataatttaaaatgtttattgcaggggaagtttatgccattacattatttgaaaatttgacaatttcgcaaggaaacagcttgaagttccccatagaaatccagggaaatggtgaactgactaggtcagggatggaattttctagagctcactcaggcttcattcatttaaaatgaaaacaaaataaaacaaattttaaataaaataaacaataatgtcaaataaatgttcaaataaaataaacttaatgtggatttaaaatactgaattccattttccttataagatttaaacagtttgattaaatgtgaccatcagttttgtttttcgttttctgtttttaaagagtttatttgagcaggcagcaccaggccacatgcaattgagggcttcacctagggggcttgaggggaaaacttttataggtgtttatggaagcaagacaaggaaaatatttgattggttaaagcagaaagtccctacttaggccacacctgtaatcccagcacttcgggaggctgaggcaagaggattgcttgaggctgggggtttgaaaacagcctaagtaacatagcgagaccctgtctctacaaaaaattaaaaaattagccaggcatagttgatcacacctgtaatcctagctacttgggaggctgagatgggaggacccattgagcccaggagtttgaggctgccgtgagctatgattgtagcactatgctacagcctgggttacagaggcaaacgctgtcaaaaaaaaaaaaaaaaaaaaaaaaaaaaaagtccctatttagaggttagaggttagttggtgttttctgattggttaaatttaaatttcattttcctaagctgtgaccattcattctgacatgggtttcagtttgcttaggtcagaacccaaggcactggagccacctcagcctaatggcctcccaattaattattttaatggttcccctcttttggctagcctttcatttgtgagagattgatcaagttttagtgtgacatcttctgttaccatcatggctggttttcctttgtttcagcgggaaactcctaagtgtgacgtcagttttaacctacctcctattatcagtaagagggggcaggagggggagttgattctacacatgacactcccagtacataatcaaagtgatgtgcaccttttatatgctctgtattggtgtgtttcctgttttacataaggcatttttcgtgtttgttatcctttgccagctggtgaaagaaaataccccaaagcacaatttcttaacagcccatgtcaagcgctgtctggtatttaatacttatttgctgctgtgttttcttcattaatttctctccaagttcaatacggagttatgtttcatgagtcttgcacaattgagtgctactcacatgactacaatgctacagccatctcattttctgtcctctgatgtgaaatggactgtgtcctacatgttactaatgggaagaaattccaggaagttgagaagcctcacaacttccagctgtggattcctcactgaatccataacagaaccatactacatttttgtacaatttcactttggtctggttgacgtataagctcttttcaaaacatattggggggactttttttttttttagctatagcaatctgtttctaacgcagtttttatttaaatgtgcagattggcaagggtgatttcagctcctgagagaagttatcttttatatgagataattgatgcactaaacacttgttccctgtgggtttggggtctagtacaagggaaaaaagtcaactaaggatggcagtaactatgatgtgtcctaacaggggtaggttcaaaggctgagctatcacagagaagggggacacaaaggcagcctggaggacttggaaagcgctggcctaggtgactgtgggtagattgtgacagcagcagtttttctggtggaaaaggggatggagggtggggaggcattcctaatggagccaccagcctgtgtgttcaaagtcctggaggcgggaccatagtgtgttcatgcagtgctgagaggatggagtgtcctaaatatagggttcattgtagggacaggatgggcatgaaatgaaagtgggaaaatagggagcacagcggaagggcctcccgtgccatgctagtgagttcgaacattaaaagcgtagggggtttttaattgggagagtgagatagtctgcattcctggtaccagagcacctgtattttgtaaaagctccctccatgggtttccagcgtgtggctatggttaaggatgattacttagctcaaaccacctatgcaggtaactcgattgtagctaatgtgaaaaaaaaaagccatgatcagttttaagaaactaaaagaacttttatttcccctccctccttaaatatcaaactggcctgtattctaagagactaacatcctgcatgattgatcgggctgcaaggcccatattcacatattcagtctgagttacaaagaaacatactcatcaaaagaaaaattagaaaaaattctattaacatcagttaaaaggtcccagattttatgaaagtgtatttttccccttgttctataaggaggcctactgttttgtatttaaatttagctgttgcaagattctgttcttgtataaatcaaataggtgaggtccagaaaatgagtgcttctaatttctcagttcttaatgccctggtttgagtttggtaacttgcgtcatttaccaccacctggtgacagctagaactaaatgcagctttgtgaagggtaaattgaaggtcaaactttaacatttaatgcatcaagaagtgagatcaaaggtgcctaatggatttcttgcataccagctatatggtaacctggattttggagtagctcctgatttgggggttgctctggggacatgtgtttagcaagatcatcttggcccaactgggcctccaagcatctgatccagacagttttccccctgaagtctatgggatggattgtttaggaatggctggatggatttgttgattcattcatttgttatctgagaatataaagatgatcaaagtctttactcttgggaaactcacagcctagggaaggagaaacatcagtaatcatataataatagctaccttttgagtgtttatcatgtgctaggtgctacaagagacaatatttcaaggttctttgaagttagtagtcagaaacaataccagccacacaagtgtgtgacttaaagtttgtaaaaaatgaaccaaaggcttgagagtcagatgttcctaggaggctatcaaacccaggagcatgtgagtctatttattttagaagctgagtgcgtcacttgggaaagggatgggaggttcttcggggcagaccactggggagactaagttgggattcaaggttggcaccccttggggccggcagtgcactgactctgccagccttagcatccttagtgctcttatctgaacaagtcaattcagatcacagaatatactagaaaagaagtttctgtaagaaatgttccaggataaaagcaaatctgcacagatagcattaattcagcacaatagcatacttgtttcttggagcaccattgctgaaaaccatgagccttgttagaagctgccgcaccctcaaatcctactcctgtccagctccttctccccagaaccaagtgtctctccagactagcatcagccctctgctctctcatgagaagtctagagaccttctctctatagcactctctctaggtgatgtattaaccattcactgatttattttttaaactaccatctaggggacagtgaccagtaggatcctctcaatatcttactatgagctgctcattaaggtgttttaaaaccacctctcttgctttccttgcctcacaagccactctgatttcttcagagacagtgaaacgagtgtatttgaaatcactttttacatcatttgattaaatattacccctgactttcttggaagcttttagttccattttgcctttcatttaaagattttaaaagttaactttaacaatcttaatactataaaaaggaatgaaaaagacataccgtgagagtaatttttgggaactatttctacaaaaatggaaggaagtttacacaaaacaaactttaaccctaccacaaccccagaagtattgcatttatccaacttctcttccagcttttactttcatcattgtaaacttttgcttttctatcccttgaggctttttgtaaactttccattttgcagtatatttgtttttagtgtttgtgtagtatactccatgaaattgatatttcataatttattaccctttcctttagtgctagacattaaggttatttagtgctagacattaatagtccatattaatggaaataaccttatttctctctattataaataatgggagcaagaacatctttatatatagagctttttcctatgtttgaattatatccttaggataaattcccaggagtgggattagtggatcaaagggtatgaacagctttatggctcttaatatttattgctaaattgcctgaagggtcatactaattcacaatgccacctgcaacacaggagaggagctgcccctcccagtcctgccaacgctcatttcttcagtcaatagttttgggcaaatttaataggtagtcaagggtaaccattgctgtttttaattggtgatgtctttaactattattaacattggacattttttcttacgggtgtttctgttctattttgtatggtttacttttcatgtcaaaggattacattttttgacaccatgtgaaatttaaaatacttgataatgaaaatgccaaatgcacacagaacagagagagtaattgatggagccctctacgttacccaggttcagcaaatagcaagatttggccatacttgctttatctactccttcctcttttttcccctcttgtgcagtattttaaagcaaatcccagacattctgcatatgtttcctatacacttcaccgtgcatctctgaacatatggactttttcttacataattataacactatcatcacacctaacaaaattaatgataattccttgctattatttaataccaacctgcaataacattttccaaagtgtcttttcttctgatgctttgttccaatcagcatacactgtgtttacatttagttatgtttctaaagtctcctaatctagagcattgctgccccatctctcccgactacttttattcgtacctaagaactgagtcagttgtcttgtaaaaatgttcacattctggattcgactttttgtgtccgtgttagctctagaagcttgattagatcaagtttcaccttttcggaaaggcaagaacacttcatgggtgatgctgtgtgtttcatcgtgtatcacttctggggtgtataatgcctggttattccaccttgggtgatgccaaggctgataatggagtcaagtggtgacaacccaaaacatgattgaatgttttttcattagcttttaccatcatggtttaatctactgatgatggatgcttgaagccattatttcatagaaattgcaaaattgtgattttctaattctgtcattccttggccattgattaactggaattattctgtcaagtaaaactagggctttttagagtctcaaaatgcagtttgaacagagaaggcaagacagatgctttattttttcctccaaactcctttccaagtaaggagttgatgccttttttacatccattggagtccagtgagctgttactgttttattctaaagacatataatagtcatgttctttaatatctttatatttcatgtgttttactcaattacactcattattatttttgatgttcagaatgttccatccttggcccaaggggagacacctcatgtccttgttttcaggcataacaaggtatctcacgttcatctagtttatttttttgtcccctgaaatgagccattccaccaagatgtcctgtgtttttttagtggggaatgctatttagagaccacaatctgcacatgttatgttcttattgtttccaagttttctcagtagatagtgtagagatacatattttacaaaagaaaataaaaattatgaattcatactgatattgtcattttaaattgaacaaaattttgtttacttctttgatttcacacttgtattgctttctcttacagtaaaaatcttggttccaaacatgatgataccacaatatacatcaaacggtttcaaaataacttcagtgttactgctaacaatcttctcagtgaatgagagattactttgcagctctatttatctttaataatccactaagaatattgagtcaaattactgtattctaataacacttggattaatacttctcaccaatttgatatacatcgtttcttcaattcagtttgttctcagattttagggttcactttttttctttttggcttcattttattttttgaatctgtaaaatatgctttcaaagttaaacctatgtaacaaggcttatgtttattacataaacctatgtaataacttatgttatcctgtctccttcacctaagttcttccctttccctattggtagctatttattaataattagggttcattttgtctttgcagtgtttcttttgcaaatacatgtgcattcatgtgtccccacctgttttacatcaaagcgagtatactgtctaccttgccatacacttcatcagtgtttttgagatctgcattttttggaaggttacacagacctccatcataccatgcatggtttaaccagtcgcttattgatggagttctgttttgtgtttcctaaaataacacatatcctttgttcatatcatttcatattttggccagtgtatctttggtatctattcctaaaaatggaattgctgagtcaaagggttaatgcatatgtactttttctagatactgctatattcgcttccataggaatagtgtcattttgcatgagaaggattttaaaatttgttttgttttcagacagggtctcactttgtcacccaggctagggtgcagtggcatcatcatagctgacttccaccttgacctcctgggctcaagcaatcctcccacctcagcctcccaagtagctgggactacagggacacaccaccacacccagctaattttttgattttttgtagaggcagggtctcactatgttgcccaggctggtcttgaactcctaggctcaagcaatcctcctcccttggcctcccaaagtgctgggatcataggagtgaactactgtgctcggcctgagagtgattttttgaaataattttgtgagcacacaaatttaatatacaggatttttggaaagttaatgtgttattaatgatcctgcatactgttcccactattatgcataacacggcctggtacagagtactctggttcctgccttcagggaagctatggtttgtctagggagacatgatgtatgattggaaaacaaagagtagtctaagatagaatatattataaaaaacaaagatggatctttttaggaagcctttcttgcttactccaggccacatgagtcttcagtcctctgaatttcaacacttttaatgagacttctaatgatccttttttcaaaccaacttttgacacttggttgaacaaatatgaatgtattgaataacacagccaaatgtttgaaatgcaggctgccctgcaaattcaagccgaataatcattttttggagagttgtatctacatttcccaaagcatgttctctggaagatcttctggctgttttaaagggttacacagcaaaatcagtgtggaaatgttggattaatcaaagctgaggagctgtgactccagaatcatgtctgctgccccaagctcacctgttcacacaatccgcctgtcttggagcgtctcgcgttaatactgttccacgaaacacagagaatcagtatgcaggctgtttcaatgaaaaccatccagccccactggaaatgaggaaaaatagaaatagaaataaaaataaatgaaaaccaagggcatctattccagttgataaacctgtacttacacaattgtacatttttgattaacaattttccatccctttctttctagattgaatcattaaagaaaaagttgcaacagaaacagctcttaatactgcagcttttagaaaagatatctttcttagaaggagaggtaaggatctctgtttctttaagttggtgtcttccctaccattaaattttatgttgctaagcctaccaccgacacttaattaaaaatatggctatttcccggccttataaaattgattgagggttaagtgccagccttgaaaatgaggttctgacagctgtttttcctttaccatcggactcccctcattccagttgctgctgacttctgctttttggctctagtttttcttattaaagaatcatcctagcaagcctgataagctgttgattagcactgataattccccgcatttgtccagtgctttataatttgtgagatatgttcatatacattccttacattattctctctgcaactttaagaaaggcaagactaagattattatctctgtattaatacatgagaaaacagaggcacagagaagacaggtggttttgctcaaggttgcccagcttaataaatgtcagagccaggctgaaagactcctaaatccagtgctctcctgtcacagcgagtgaagatgtgttagaggggacttaattttacctgaaactttcagatgcttagtattcttgactttctggctttttgaaagtcatttggggattttgtatatgttccagagaagaatattatggggttggaagaactttacaaggagaagtcaaaatctatttgctctaaaggttctttattagagcttggcattgagcctttgccttttgagacttcctgaaaagctggtttgccaagcacctgtccttatctgtgttcctcgttatagtccttccacagtgagagagcccagcagacaatgataaagtaagaagaaagagaagagaaaactttgattaagccctgctgtgtgttgggcactgttagttactttggatatgttctgtgtaacacagaagttaagagtggaatccaacttacccaagtgtgaaccctggatctgcttcttatcagctgggtgatgtgggggaagtttcttatcattataaaggagggatcataactgtgctatgtgtgggtgacagtgaaatcagaatgtatagaaggtgcctggcatgtactaagcactcaataattttaaacgtattattgttgttccctctttattaaaagggacaccctctgagttagatgatattttcccccttttttagatagggaaactgaggttcgggggtattaagaagtctgcccaaggttacagtagagatgggtaagcctggatccagatcctgagctctgaaccaccatgtttgagtgggtggtgagctgagccttcttttactctgtttttgaggggttgccttacagcagtcataaccagaagtccctcatggcccataggggcctggcaccagattcaacgcccaagagtctctgtcttttgaagctgagtaaatgggtattttccccatttccactcctgtcttccctgccacagtcattggctcagtgccagccttgtgaatgaacatttctgtttctaagattcctttctgaaattgcagctccctgtgggaggaagcacaccttccccagtaagagtcagaaaatgagtgccctagtggaagcccatgtggccaaagagaaggcagtcacaggagagaggaaagacagactgacaggagaggcagaaggtcccccaagacagtgccccccacccccacctctggctgtgctgctaaagcaagctctcctactggtagattcttaaatgtccaagggaatattgcacatggggagtaatcttagaaatagctatgttggtttatgctcagtgtattaaactcatgtctcaccttagtttgggttgctccagcccttgaaatgtggagtccagatagtttatctgggaggcgatctcaggaagccccactaggggaatggggaaaatgagacagggaagggaagagagccaatagcggtgccatatcaaggaggttgccctgaggacagctgaggctcactcctgctggggatctctgggagatggtgtggaagtggccctgagctttccttactgaaaggccagaaagctggggcatttatccactaactcccatcagtcattagctgaggcctgctctggggggttgtggcagttctagcctgccctcggcagagccagttagactctggtggtcaaaggaagcccccagatgaagaatcaccagtggcctgttaggaaacaggaatgcccagaggatgtagcggggtgggtggcagtgtcagctatgtctatctaataagcaagactttgaaaaccagtttttttttgagcatatcaataatgattatcaatttgattgattaaattccctgaaactatttaaattccaatacaaatttattatgactaattgcttttggccacttcacacatccaccttaaatagcagacaatatatacaaaaaaagttgcataataacaagatttaataatacatttagacttaaacctattctaaaatactaaatatcatgggttttaatttattttgtcattgtttctgttcttgttttttttttttttaaaccttcctgaggccattgttttacttctttcaatattttcttagggctaacatcattttgacacctttcagacaggtgcagtcatctttgagatccaaaagagaaaggataccttctctaaattgctaagattagaggatgtgggttacataggttcttggttgggtcacaggaccctcagtggcttcttccaaggtgattcaaacacaggactccttatcactgtctttagcactattaaaaacttatgcattctttatcaatatttcatcatacatagctaggccatgtagagatctcctctcctagggaatcagaggtgacattcaaatacttggttttcctctttggctctcagactagctgatcatttacacacactctgccgacgctgttccttgctaattgtggatgatagctaatgctgacacgttgctgcccaactctccacttgattgctctacggcacggatgctaagcagtccttctccaggtcctgaagtcctggggtgacctaacttacatgttctttagttattctttctaacataacagaaaacttttaaatagatatctaattaatacctcctaaaagaaaccacaaaagttttggtagataaatctggtagctccccatcttactaataagtagctacatttgtgaagagtgcaattgcagactccagactcagactacctgagtacaaatctcagctctgccacttagtagtgatgtgatattgagcaagttaattaactgtcctatgccttagttggcttattggtaaataggaactctctctgtgaagtggcatcctctccatagagttgttatgatgattaaatatgttaatacttaagtgattagaaaagtacctggctcatggtaaatgccatatgtgttactgtttctttaattgcctgcgtcccagggactcttttattgtcattgataaatattttagatttatagctatgtcccataatgaatcactctttctcttttgctcatcctcaaagttggagactatcatcaaactcagctgtgtgataatttaacaaagagaatttcacctttaggtgaacatgagcagggattgtacaagccaggtcctactagcaggccatagggcccagcagtcctttgcctgcagcaacctgaaaggttcatcctgggagggtgaggctggacgtgagtcttataggctggcaatatttcagcttcttttagcagttggccccgatatttgcagaattcataggagtttgggattcatatcaagtcttagagtttaagtgtcataagctgatggtcttgtatgatgtcattactcctattatgtattctggctccatgcccaggcagtatttggggatttattgatcatgcctgtgctcctcttagccacagtgctgttggttttaaagaagcaacccttagtttcagattgaagagccttggctcttacacatgtcctcagttagtccagttcctagctgttccccaagaacactttagctgttctgcttcttgagctacgggttcaggactgcatgacatatccagcactgtgctggagctgcttcatactggttaatgaaagcggaagacatgcatcacttctcaggtctccatttggggatgtcatgttggtcgcttgcaattagctatggaggaggtcttgacaccacagaaattgacatatgtcacaatcagagctttttaacctagggattttattgtcaaaaatttactagtgcaccattagtgttatgtaactctgcagttatacctaagggctttgtgtttttaccctgacacctctgcttacaagcagagtaactctgggcaggtaattctacccctctgagcatcagtttcagcatttgtgaaatagggataatccctcccacttgaaagaaactttttatgattaaataatagatacaaaagacttagaattgtgcttggcacagtgcgaaagatggacaaatgttaattctttcttaattactcaaccttttggagacttcggttctgactcacattctgccattatctgtgcatgaccttgggcaaatcatgccaccaacaacctggactcggttagttcatctttaaaaaagggagaaggcttagatcaactctgagattattaccatttttaatgtttgaaaactttgttgaaatgttgaaatcgtattaggatcctagacagttaagggaacaccctctacctgatcctgggctcggagaaaaggacaggccctttcctaggtcatggctgacactctagaacccttcttcttttcttttaaaacagagaatatggattattttagtccctggattcatcatttgtgcttacctgggtttaaactcattagattttgaactccctcctccctctgccccaaatccaaatgacacagcagactcctaaaagcttgctctagcctggccctgtcagactacattttcatcaaccaatttaaaatcttcctgatcccgctgatgagtgagaacatgcggtgttcaggggacataaacatgggaacgataaacactggggattactagatgcgggaaagagggagggggaaaaggtctgaaaaaccacctactaggtactatgcttattacctgggtgatggcctcagtcataccccacacctcagcatcccacaatatacctttgtcaccaacctgcacatgtgccctctgattctaaaataaatgtgaaaaagaaaatcttcctgataacaaaaatatgcccattcttttttctttttctttttttcaaacaattttttttattagctcaacttctggagaagaagaaatattctccatttccaatatagaaaatgttcttaaaataacattgcaagcatttatcttcataagctttctgaaactctgaacagatttcgttacacttttctctgtcggatatactacacttacagctcaattcaaaagtcagaggaaaggagtcaaatgtcttggttttgtccatcctgcatttaatgtgtgttgtgtagcacctgagcctctcagtgtgtctgttatgcattcttgcgactattattaatttttctgtgtaatgttggagcggcagcaccaggcactcggctccccacatgcattttatggaacacacattcagtgtatgtgctacagcccccgagctgcccacacccctgggcctgaggggaatggtgggggaggtgaccgccaaacattcgtgacataatttccaaaaaatgtccagaagtgctgcacattttctcccttcgtgaaaggcacatgtgcctcccaagccattgggttggtattcgttacacatataaacacaagggggtggtgtttgaaagcaggaaaaccatggaatttgcttctcaatcccagaagcaatcttttttgtagcacagtccaggcagcagtctgaggctattctttgtcgttccactgtagtcatattctgcaagactaagaaggagatagtcttgatttattgtatcaaatcggttaatttaatttttaaagacttttcttaaatctgtcccacgctctctaactctcctcttactgcccatgttcaggctctcatcatcttttattttttaccttatcaacttagttatttattaacttacataaataagtttctgttatttattaacttacataagtaagtgtttctgtttaagcatataatccactgagttttgacagtgtttatacccatgaaataaccactacaatcaagatagagagaatttctatcaccccaccaaagattctgtttcagtttgcaacccagctttccattcatccctaggcaattcttgatcttttttttctgtagatggtgagtcactttttatcacttttggtcactatggatttccatttagtgggaatccactgtatgatttgcatttctagaaatggaatcatatagcatgccctcttctctgtccagcttctttcactcagcataatgatttgaggcgcatctaagttgtatgcattcccttttgttgcagagtggtattccattgtatgaatatatcgcagtttattcattcagctgacaaaatacatttgagttgtttccagctctgggctattgtgaataaagctgcagtgagcattagagtacaactcattatgtgaagatagttttagttcctcttgggtaaattcctggtagtggaatagctgggtcgtaaaaggaggtataagtttaactttttaagagaccgtcagtttttcaaaggggttgtagtattttaattttccagcagtttgagtgtaccagtgtctccatatcctaacccagacctagtattgccaaccttttaaatttagccattcagtgttatagcttttagaatttgtctagtaggttttctggctttgaaagctccaaaataaaaataaaaacaaaagaaaataaattgagccatgctaggggatatagagtgctgtctcatgtggttttaatgtgcatttccttgtcaactggtgatgctgagcatcttttcttcttttcgagaatcttttcatatgctttttgccatttataagtttcatcttttgaagtgtctgttccaatctttagtccgttgttttattgagcttttagttttcttactattgagttggaagagttctttatatattctggattcgagtcctttgtcagatgtatgtgctatgaacattttctcccatcctgtgacttacttttttgttttcttaatgatgtctgttgaagatatatatatatatatatatatttttttttttttgcaatggggtcttgcacagatacccaagctggagtacagtggtgcaatcttggctcaatgcagccttgacatcctgggcttaagttatctcctacctctcagcctcctgagtagctggcactgcaggtgcatgccaccacgctcggctaatttttgtatttttagtagagatggtttcaccacgttgcccgggctggtctcgaactcctgagctcaagtgatcagcccatgtcgggttcccaaagtactgggattataggcatgagccaccatgccaggccctgttgaagagattttttatttttggttttcaattaaccatttatttcttttatgatttttgtcttttgtgtcctgagaaatatttgcctactacaaggtcacaaatatgttctcctgtgatttcccctaagaattttatggtttttacttgtttatttagttgatccattttaagttgatttttgggttttgtgtgaagcaaaggtatcaatactctttttttctacacagatgcccagttgtttacttttaatgtctctttaatttctgatattatttgtaccctctttctctccctatcttatccactctgtgtctctgtctctctttctctttctcttctttaaccagatagtgggttatcaatttttgttgattttaaaaaataattaaaatagcttttggctttggtgattttctccattgcttgtctgctttctattttattgacttttgccctgatgttcattacttccttccttctaattatttcgggattactttgctcttctttttctagcttcttgaggtagaacttaggtcattgattttagacctttcttcttttttaatataaacctttaaagctataaatgtccttctaatctctgcttcacctgcatctcacaagctttgatatactttacttttattatcttccagttcaaaatatttcctaatttcccttgagatttttctttgatttatggattatttagaggcaggttatttaatttccaaatagttgaaatttttgttgatatttttatttctaatttaatacttttatagtcagagaacacagcttgtatggttttaacttttaatttattgggacttattttatggctcagcatatagtttcaattaaatttttgtgaaaaaatatatattttgctgttgtgtatatcctacaaataccagttgggtttaggtggttgataatattgtttagataactgacatttttcttggattttgtgtaattgtcctatcaattgccgagagaaaggtgttataatcccttaccatggttttagactgtctctttctttgtttttactttgtgtattttgaaactctgttactaggtatatacacatttttgttatgtcttgatgatgaattgatctttacaatatgaaatgttggtccctacctttgtcaatactctttgtcttgatatctattttaactgatatgaatgtagccatttttaccctgttatatttactgtttacgtgctatatattattccagccacttactttcaactgatttatatctctgtatttaaagtacatctcttatagaaaatagttgggacttgcttttttatacatagttatagtctctgccatttaattggagtatgtagtttactaatatttaattatatttatatgattggatttagagctaccatttcattatttgttttctgtttgttccttctggtttgttttgcttattttgcttgcttgtttgttttgttctcctttttgccttttggattatttcaattttttaaaaataccattttaagttatccattggcatttttgctgtgtctcttttctctaatatgttggtggttactctaggtattgtagtatacatcattagctgttcactgtgcacctagagataatattgtaccatttcttttaaaatgtagaagtcttgccatgatatacgttcatttaccgctgtgcctgtggttataattttatatgtattgtatctatatacattataaaaccatgatacatgattatcatttttgctttaacaatcatatgtactttaaagaaattaagagaaactagattctttcatatatactctatttctgaaggtctgagtttctctctgatgtcatctcgcctcagcctgaagaaattttatttagaattttgtgtagtgcaggccaggtggtaaaacattctcttagtttttcttatctgaaagtaaggtttttatttcgccttcattattgaaagatatagagctctaagttgccggtttatttctcttggtactcattgtttctgggttccatggtttttaatgaaatatctgtagtgattcaaatgattatgctcctgtatataacaggttgctttcaagatttttcttcatttgtggttttcagaagtttgactgtaatgtgtttctctttgaatttatcctgtttggggtttactgagcttcttgaatttgtaaatttatgtctttaactaaatttggggagttttcagctattatgttttacagtaattttctgctttagttttcctctcctctcttcctttgactaaaaaacccgtatgttaggcttttcaaattgcttcacagttccacagtgctccatttattgttttcagtcttttgtttatctactttcaattggataatttatattaatgtattgtaaaatttactgactttttcctttaccatcttcagtcttaagtccatctagtgacttttaaaaaaaaattcaggtattgtactttcctgttctaaaattttcatttagttcttttttgtattttctattttttttactacttcattaattgtaagcatatttttctttgtctgactgatcattgttatgatggctgcattaaagtctttgtctgaaaattccaacatcatagttacatcaggattggtgtctgttgattctcttttcccttaggagtgggtactattttcccgactctttatatgtcacataattttggattataagctggacattgtgagtgctttgttgggttcttgttttaaaaggcaatgaatttagccagacccaactacatcctgcctgtctgtgatgctgatggcagatctcagttcagttctttaaacattagctgcaaacttctttcagttttctccagacatgcatggttcagtggtctaccagagacttgaactgagtctgtatacaagaatttagtgttttcccccaactctgactctcctcttttgccttctcccctactgttagtagccctggcatccttctccgggtttcttcccccagaaagatgatctttctgttaatattttactttatctctactgccaccaccatgactgtgctgctctcagggcaaatctgccagcaaaaagaaaaataataaaacacggagaatatagagaactgcttgccacatgcttcaagtttcacctcatctccaaaacttgcctgtctttgttcacttctctagagatctcattagttgtttctaatctgttattcagaatgtacagctgtgagttgcagcaggatcagtgtgttgagtgcatactcctctcactgcaagtgcagcccccactctttagctgaataattgcagtggtcttcctgctgtctttagtcttattttcctccaatccagctttcacttgggagccaggtgattaaaataaattctggtgctgaccttgctattgtaagattgatttctaacttcttgtagtggcatacatagcctttcattaataacttctacacacctgtgtaatgcaataaggtgccttttctcaacccagtgtgtttccacagttctggaatactcatcacctttgatttttcttactctctttcccttgcctaactccagaaactccaccgctgtccccattttgagtcagatgtcccctctgagttccctcttaatattctgtggatccccctataatgttacttagcacatcgttctattatttgctgctcagttatctgtattcccccaagaccgagctcctcaagggttgcaaatcatgccatatttctttaacttctaactcttccctcacctaatttcactgcctgatatatagtagatatacaataatttttctactgattgcattatattctcatgagtatacattttttatttctgtttctatgggtgtctgttgtgcacacacagagttcccatgaaatagaacaaaggatttggggtcatttgtcctccattcactgtgtatcagttgcggcatatttgctaaccttgtcttttaggccccctacctataggtattagacccagcatgctgtgaaatccttatgattaaagtctttacactaagaagggataaggcgatggtattactggagtatccagcaaaggcaggcgtcttctgcctttctctttttttataaattggagagttcagacattgctggggaagctcactgtctctttctctctctctctctgtctgcacgtgtgcgcatgcgtgcatgcgtgtgtgtgtgtgtgtgtgtgtgtgtgtgtgtgtgtgtgtgtgtgtgtgtgtgtgaatgctgatgactctccgggaataagccagcactggggatgaggtgatagattcagaacccatcgatctgtcatagcatgtcatctactaaggaatctggaaagcattctcttcctttacaccatttcttatttatcagaaaggattcattgacttttacattgtacggaacatggattttcacaagaactgatacgttgctccttggtatcaacctttcagagcgggagctactgaatgtttaacccacatcctttctttcaaaacaaatgagcttctgtctccatagaacttttaaactttcttgtgttacctagtgtcttagaatagtgcctcagcttcagctccaacttaaagaagaaaagaacaaatggtttcatttctagttatgcaaataaactgctcattgtaaaatcatttataaatttatttatttagcaaatatttatcttgtatctgctgcatgccatgctttgagcatacaaccaggaagatagatatgatcactgcttcatgaacatttagtctagcgttactgaaaaatatatagaagcactttttaaaaagcatcccagaatctcaatacgcagacataaccactgttcacttctttctgaatattttttttttggcatttttgcccttcggatttcaggcaccagcacttcgtctattttcatttcagtatcttcaacttctttgtctattttcattttggtatctcttgcttctttgtccttcatttcccccatgaggcaaatctccaattgctgagcatctaatctttaacttatgtaatgtttggctctggcccgaaagaaaaaaaacttttcagaatgtgaattttaatcccaaggagcttgttctactttatatgtgtgagattctgaattttccacacctacgaaagactaattaagttatagaggtatttcccactgttaaattaaattaacagacttgctcattttatagtttaatgaggaggtgttaaaagttgggctgtaccttatttataatggcaaaaacgtgataaatatctaaatgcccatcaataagagactagttaaataaataatgtatccatagaatggaatactattaatgagttaaaatagtttgttgacataaaaagaaaactaatatagatggaaagatagctacaacaaattagtggctgaaaaagcagattataacatagattacaatattttgttttcatttatgtaaaattggatgcacatgtctgtacatgcatagcaagccatttgtatgcattcagtcaatctatttcttcaacaactattgtgtaagtgatgctctgtaaatacattgtgatagttgcccatgtcatggggcaaaatcagataatacatataaattgtatcatgcatatttgagggggaacatatttgacttactgaaagtacctttttttctcatctccagaataatgaactacaaagcaggttggactatttaacagaaacccaggccaagactgaagtggaaaccagagagataggagtgggctgtgatcttctacccaggtatttaggaatttcctgatttttttttttattcaaattcctctttggctgaagaaaatactttactaggctgttcttagcagaattgcattcttcctatcacaaatatttctgcaaagccgagtggtggctgctgagaggcttgactggtttctgtaggaacaggggcattgtgcagggtggaggggtcagcaaaggagagacctggggaagccatttagagagagatgggccctgtcagtgagtgaatgcatttgttccttccttccttccttcattcattcaactaatgctcttagtaccttccctgtgccagacagttatgacacagagaggagtgagatttggttcctgccccagagtacagtctggagggagagacaggtatgtaggtagacatatataacggtgtgagaggggcatccgaggtgctttagtgatatacaagagggaggatctaaaccttgaacaaaagtcatctgttcctcagtactgtaacagggtattgtcaagcactggatccagttcataaatacctgatctgcttgagtcatcggcagatatgtgataactataacctggtttgttcagttacattcctgagctagaggactgacctgttcattgttaagctgcttccatgcttgcgtctcttcctggtgacattagagcctgtaacacagtaacctgcctctgataactaactcaccattcccgggtgctcacaactgtgcctggcctcaagaggacataaaacaagtttacagcaaagatgctaatgacatgtgacttgtgatttaggtaatcaaagtcacaaaatgcctggtatcgtgtgtgcaggagggtggattcttgtgtgaacaggggcacttgtgtgtgctttgctggacatagtagtctagaaaaatgtcgaatcctggaatcttgagtggttacagctggtgggaagtagtgacgagccgatcaccaagctggggtgtggaatacctggttcttgtcctaccagccagcagcaggatgccttcagacaggttcttcactggggcctcggtttctcaacttctaaagtcagtgatttgactaggtaactgctcaggcctctaccagctctaacattgtacagtaaggcctcctttccttactttattaatttttatttattactggtattgtcatttttgttaattaaaatgaatcacttgccattctcaaagaatttaccaaaagcggcattaggttctttctttgacagtgtcctcaattacattgcttgccttctagtaaaaaggcattttttatcagtccaatataattaatagaaaatgttgaatatatatatatgtatatatatgtgtatatatatatatgtatatatatatatatatatatacatatatatacatatatatagactccggatctcatcatattcagatatattttcatatatgaaaatataaccaaaaagaacgatcaattgtgtacagagacctttttgaaatttaaataatttggccgtttcccccctttttgtatttttcaaaagccaagtggcctagtccactctaattgcccacataataaatcttgtttggctaagacgggtacaaaactatgtctgaaaccaataaattgtttgttttctaattcccgcattttggcttaaaacaagcttttcaatttgtatgcccaagtatagcctgaagcaaacttttatggctaagttatgaaaccacaaagcggttttcataatggaagtgctgacagacccttaacttatggccatggtgaacttggaagccacttcagtatctaaaagcagcttttccataaatgtaacatttggtttccccccggatccatcttagcagtttaactacctaggtcaatcagcagaggaaatgaaaactacatatccgtgtttccgaaaaggcagaataatatttcattcgtttcctcgcaaatatttattaagtgcctactatgtgaaaggcgccagggaagtctgggtggggaggagcccagaatctttcggtaactcagggcagtggccttccacctgcgcttcttggaactgccttactctgagctggggctcctggagaggcttcgggatgcccggggggatgaggagggttagtgagcggctggaccgtgggacccttcttcctccccaaaacaactgagaaagtcagcttttagtttgttttgtctgttggattccaagtaagattctgtttgaataaatagctctatgggcaaaaacaaattggaactcccggtctagttaatccccatgttttatggatgccagaactggggctcagagagatcaagtgattcactggaagccacatagccagaattagaaccaggccttcttgagtcttggtgcagtacatgtgtagtttgaaaatatgtaataaatagagagctactaaatggtggtgtgtatgttctaacaaaattcctggttcatacttggacttcaaatttgcatctaactaataaaagattccatggtattgtccagaatgttttttagatttttgtttctagaatgttttagaccaatacaagcattgaattaagcctgagttatgcagaagcgttttgttctttgtccctattcttctcctacaaggaattcaccagtgtggaacagtcagggaggctcaggctgtccagttccctgcccagccagctgctagctgagctcagccttgggcaagttacttcatctctctaaagcttcaactctttcatctttaaactaagaatgaagaggataatatcaaacctcattgggttgctttgaagattaaataaaaatgtgtacataaagcatttagagactgggcatggtgggtcacacctgtattgccagcactttgggaggccaaggcgggaggatcccttgaagctaggagttcaagaccagcctaagccacatagcaggaccttatctctaccaaaaaaaaaaaaaaaaaaaaagaaaagaaataaaaaataggccaggcatggtggctcatacctgtaatcctagcactttgggaggccaaggcagtggattgcctgagctccagagttcaagatcagcctgggcaacttgatgaaaccctgtctctactaaaatacaaaaaattagccgggtgtggtggtgtgcacctgtaatcccagctactcaggaggctgagacaggagaatagcttgaacccgggaggcagaggttgcagtgagccaagatcatgcccctgcactccagcctgggcctgggcaacagaatgagaccccgtctcaaataaataaaaataaaaatgaaagcattttagcatggtaactggaccagagttaagcacttaataactaatagctattactattaatattaactaaacccaaactctgattttctatgtagaacactatataaaatacaaaaaaatctgagtatgctaagatgatttcattaactttttattggtggtaatcattgattttatgaaatggattgatagcctgatcaagtatatagtacttcagtatgcattgggctcttcagttaaactctctagacaccccgtctagacactgtgtaaaactctgggaggcccagtgattgataaggtctctgtcagctaagacctgagagtggcccctgcgtgctgtaggcatggggcacttgtcttattgtagaatagcatggcctctcctactcactcatctgtacaactgcaagtgttacatgctgtgctactgctaatagcatttttagagctgctctacttttttttttgtcttgtgtgaaaaaaaaattgcatttagttgccgggtgtggtgtctcacacctgtaatcccagtactttgggaggccgaggcgggcggatcacctgaggttgggagtttgagaccagcctgaccaacatggagaaaccccgtctctactaaaaataagaaattagccaggtgtggtgacacatgcctgtaatcccagctactcaggaagctgaggcaggagaatcacttgaacccaagaggtggaggttgtgttgagctgagatcgcaccattgtactccatcctgggcaacaagagtgaaactccgtctcaaaaaaaaatgcatttagttgatgctcaataaacatttgttgggtgaataagtgaaagatacataccaaatgaagaacataggcaggtgatcagtattatcacatgatttatttatttaataaaggccttggatgaagtcattcctgcttatgtttcacctctttgtgtgtgtgtgtgtgtgtgtgtgtgtgtgtgtgtttctctctctctctctctctgtctcctcactagaatatgagctccatgagggcagggattttcatctctttcactaattgcattctccctgggacctccttagagcaatgcttggcacatactaggcactcaatatttgttgaatggagccatctccctgtagcatttgacaatccttcctaagaagaaaggaaggattcctcagcctatttcctacccttgcaggacttttctctcctggttctccacctatctccctggtctgtccttctccagcttctctgatggcttcttttcctcctccaagaccctcccatggtagtccacatggctctatcttggttccggtactttctgcaaagattacatcaagtctcacagcttcacctctcccctctgtggctgagccacagaagtgtgaacctttctcttgaatacaagtccttgttccccacagccttctgggcacactcccagctggtgtctgcttggtcttcatacttgccgtttcatggccgagtgcgccatctctttcttcaaagtctctcctcttaggagtgagtaagaatactggcttggaagttagacctgggtttgggtcctgagtccgcctcctgctttatctgcagctttggcaaattcctaccctccttgattctcatcttgaaaaggatgattttggtggcaatccctttggaagcttgttgagaggattaagggaagtaacaggcatagaatgtccagtggaagtgccccgccttttcatatttctgtggctgcagccactgctttcccagctacctaaactcagtatattgcagtcacttctgagtcagagaattattttgctccttgactcactcactcatactgtgctgttcttttccttcatgacttgactccttctttcccattcctcttgctgccagcctgcctcagactgtctaatctactcagtaccatctctctgcctcactttctcctcctcaaattcttcccctccttcatctaatctttgttttccataaatttctagtgaccaaggatctcttcataaagagagagggaaagggaaggggtgagaggggactcactgtgggttcaggagttcacacacacacacacacacacacacacacacaaatgtatgtgtgtatttaaagactcaggagtttagtttgaaaactttgatatatgttaattaaagccattgagaacaagtgcaggtcatctagccttcatttacaaagaaaaatgaaaaaacaaaaacgaaaggaaaagtgacttttctttcttctgccctgtagtgaaacttggtttccagcaaaccagcaaacttggttttcatcaattatgtcttaataggtgcaatatgatgaaaaatattccccatggtcataagtgctcagcacgtagtaagtgctttaaaatgcttatattttcgtatttcttttgcaaagaccagaacacaaagtagctttttgtcaaagctttatttgctgattctgctattgttttccccaggggaactgcccctttattgattaataaaaggttaacaatagcctaaatgtgttaaggcaaatggttgggtttcagttttgtggttgaggttatttgtgttcttgaaatcctgttgtttcctagtgatcaacaaaataaaataccccacttcttttttaaaagatcgggatatgagagcctgtttttgaacctagaaggttcacctttataaatatttctgcattttatgggctttcaggatattgtcattggagactgtttctgttatgcagaattttcacaggagttggcacaaatagccatctggcttctgcccctggcattccactaaactgcctggtcaggtcagtggggcctcctggatcaccaggtcccatggattgctctctgtggcaggtgacactgggaccacttacttcttgaaactcctccaacctttggtttcctttgtaattcgtatgtggggtaatagctctgtggctggcttctgtgagctgctggattcatggagatgacggagatgtggctttcacccttaaagaaattatacctagcagtggacacaaatgtgtagaccaacaagtgcaataagatgctatagaggcttggcgtggtggctcacgcctgtaatcccagcactttgggaggccgagttgggcggatcatttgaggccaggggttcaagaccagactggcccacccagtgaaactccgtctctactaaaaatacaaaaattaaccaggtggtcatggcacgcgcctgtaatcccagctacttgggaggctgaggcaggagaattgcttgagcctgggaggcagaggttgcattgagctgagatcgtgccactgcactccagcctgggcaagagagagagatttggtctcaaaaaaaaaaagctatggaggtgtcagaagcctgtataatagtgatgttcaaggtgtatatggggattgggtggagaatatggagaatctcctgggggagacatgcaaagtttaaaatacaccccctgccatgctttttaatacatcctctatcacctggtgaatgactggatgtgggaagttaggggaaagggattcgactcttaggcttcatatacacattttgtcatcgtgttggttgggataaggaatgtagctatttgaaagaacccacagatcttggtggcttagcatggtaaagattaatttcccatgtcagtttaaggccgtttggtataggtttcactccacacagtctttcaggaacccaggaattcctccatctagcaaccctgcctgagctttggagtcctcctggattctccacttgtatgctctacataaaagggaagagagagagagagcgtgggggattatgtagatttttatgggttaaacctggaagtagtagaagtcatttctgcctgtttagtcacatggcccacctaatggcaagagaagctgggaaatgtagttgagttgtgtgtccaggagaaaaaagaaatgggatgtcttagtcacctaatcctgttaactataactctcaaatgtctccctaaaatctccccgccacttcccatcaagtgcttccgtcagaattcaagttgtcatgatctctctttcacctcctgaagagcaagaattttctaactgacctgccttcagaataatccttccctagtcaaccctcgatagtaccagaggaatcttgctagaataaaaatatgagcagatcatggccctccttaaaaacctgctgtagttccctgtccccttctgaactccttagccagggacatgggacccttctccaccaggcctcatcttctgccactctccattgtgaactctttgttccagtcgttccaaaggagcacatggtttgcagttccacatccacaaactgtgtgctcacccatctctgccttacacatactgccccttcttcctggagttcccatccccgctttgcccgcttgatgagtgctaggcatccttcaagattcaccttctctgtgtgaatttctagatgtgaatttcctggtggtgctaaattgttctgccctcaattttcccatcatgtgttcatgctcattttgttcaggtcatggcgggaagggaggcttgagagttaaatgaagggactgttgtggatgtttgggcaactttaagggaaataaacaagggacagtggcaggctgtggaactagcaacagtggaagctgttaccacccttgcctgaggaggcaggggagaaagctggggaagataacaagttggggagctgtagctatgggccctggtagagggatgccgccaactaccaagctgcagcctggctgggaaaggaaaaatgtcccgacctctttgtcctctcattccctgatcccctgctaccaccttgcagtaggccaaaaggaactgaatttgaagggcaaatggatgctgacttttccgggccacagagtagggtggagaaggggcagagtagggctgaatggcaaaagaagaatgcccagcacagctgttatgtctctgttatagttcctaacacagtacatgaaaattttttatgtacatatctttcccaccaggtgacaagtcccttgaatgcatgtttcatatttttctgaaccatggatgcctagtacaacctttacaggttgttaaaaataacttttttatttttaacctgtcgtagtctgttctggctgccataacaaagtaccataaactagttagcttataaacaacagaaatttttttctcacagttctgaaggctgggatgtctaagaccaaggtgccagcagatccagtgtttggcaaggacttgctttctggttcatgtatagtgtcttcttgctatgtcctcacatagcagaagggatgatgatgaatatttctggggcctctctttttttttttgagatggaatttagctcttgttgcccaggctggagtgcagtggcatgaacttggcttactgcaacctctgcctcccgggttcaagcagttcttctgcctcagcctcctgagtagctgggattacaggcatgtgccatcatgcccagctaattttgtatttttagtagagacagagtttctccatgttggtcaggctggtcacgaactcccgacttcaggtgatccccctgcctcggccttccaaagtgctgggattacaggcgtgagccaccacgctgggcctggggcctctctcataaggccactaatcccattcatgagggctccaccctcatgacctaatcacctcccaaagtccccacctcctaatacatcaccttaggggttaggatttcaaaatatgaatttgggaaaacgtaaagtccattgcagggcctgtttgtaatatttaagtgaaatattaagctgcattattgtctttttatttttaaacacttaaacaccattttctagagttgtcttaccatgtgaagcatatggggggttttgttttgtttcattttcctgacctgcattttctcatttctcagccaaacaggcaggactcgtgaaattgtgatgccttctaggaactacaccccatacacaagagtcctggagttaaccatgaagaaaactctgacttaggcactcagaggcatacactttttacagatggacaaaagctctggaaccctgtggcttcaaatcctttgggaagggtgactgttgtttcccctacacacagtgtaagccggaatgggaatcgctgaggctctgatccacttctaagacaggaaggaaagtgaaggcagagtgagcaggtaagagagggatatacaaggtcacatttcagacacccactcggcataccctgccgtactgcatcatcatttgttttctttgtagacactgaaatcctatcaggaggattccttcacaatgtattttatttgctagactttggttgggagggaaaaggacattaatttgaagtttcatgttattcatgccaggattgtttgatagagcatgaaggttttgtttacccataaaagtattagaggcagcgtttctctgatacagagaggcctgtccacaagaagcatgggcacccagccaaacttgaacctggaagggagggttcccggcctgcaggtgctctttcctcttggtcccaagcatctgtgcagggtcgtgggagccacactgagagacttgtgtgggccagacaagcttcattctgatgcgctagtcccttggtttaatttgtgccttatgctttcattggaccagctgaaatcactgtatttattcaactagtgatttttttttctttctcactttaacttaaagagaattttatatgtcttggaaatttaataatttagtgttctcagtatcaattggtgtttttgttaaacgaatgaatcatctgttcatgcatgctctactttgatattataacctatgtcacatgtgtttaataaataccatatattttgttctactaatgttgtctctctgtttcatccatgaccatgtagaaggggcagagagcagatcaggctctggaatgagtgtcaaagtcaaatcacatgatcttccagccagtacaattcatacaagcatctgtaaaccataagattgactgtgtgtgtcgggggagggtggggggcctatctgtctttttaattgctgaactttagttaatacaccatgtggaaaaagcaagataccttaatgatcacaaagtacaaaaatagattttacttttaaacctttcctcaaacctcccaccccttactgtctccacttccaaaaaaccaaagaaataaaaaagtaagaaagcaaagcaactcagttagataaatcactgtgagtcagaatcatgctaagaggaaaatgtgcatttgggagccacatttgtatttaaacactgtccgtgggaccttgggcgagtcgtcaaggctctctgaatattagtttcatcctttaaaaacctcggattatcacacctacttgataggctgacgtgagtgccacatgaggtcattcccacatagggagtgggcactgctaggcacacaggcagtgattgctgtcattctggaggttttagagcactgctgattgctggttgagtctcaccactggaggtattctagcagcaaaaaaccgtgttctgtggcagccaccaagaaggagcacttagagaaaaagctgtccttaggaccaggagatagggaagctggactcagagagaggcagagggttctgggagcccatccccctgaagaaactggtctggaagcagtttctaagtgaaatgcaatgacttaaaaaatgtcaattttaatgagaccaaggtagaaatgaaaactactctgccaatacttccacattcacttctttctctctctcttaaaacaagcaaggaaaagaaaaacttagtaattttaaatttaaaggataccagggaccattctgcagctcgggcctttgtattttaaaatatatcttcaacatatggaaaattctaaacatgatttgaactactcaagaagactattaaagagagttcctaaattgtacagactgaaaccgaaagaagctgagagataatccttccagatcctttgtcaacattgactctagtgccccccaaccctccatctaaaggactgacattcatcaacctcttcatgagcaggggtattacataaaattgggagaatgaactctaacatttcatagtaaatttatctcactgaaatggaaagcagcagtgtatgtaaagggtttttaaaaaataaaacaacatcctataatcttccaattaatatcttcattccagaccttccagaattttaaaacacacccgctccattttgtttttaaaataaatataaccctatactgagaagtggaatcatgtgatttttaagaacgtgggaacactcgagtcagctatctgagcttagtcactagtgcgcatgtgggtaagtcacaaccctgtctgagggcctgtaaaattggaactgtgagagttctttcctaatggggttggtgtgaagagtaaatgagttaatgcctgcatggttcttagaatagtgcttggcacatgataagcacttaatatatgctacctattaacattacatacttttgtagccactttttgcttactttatatatatataaatatatatatacacacactttatatagtttgctttatatatatactttatatatagtaagtttgcttactttatatatatacatataatatatatttttgcttattttatatgtatatatactttatatatgcatataatatatatgtatacaatatacataatatatattatacacatatatgtatacaatatacacatatattatacacatatatgtatacaatatacacatatatattatataatatatgtgtacaatatacacatatatattatatataatatatgtgtacaatatacacatatatattatatataatatatgtgtacaatatacacatatatattatatataatatgtgtgtacaatatacacatatatataatatgtgtgtacaatatacacatatatataatatgtgtgtacaatatacacatatatatgtgtgtacaatatacacatatatatgtgtgtacaatatacacatatatatgtgtgtacaatatacacatatatatgtgtgtacaatatacacatatatataatatgtgtgtacaatatacacatatatataatatgtgtgtacaatatacacatatataatatgtgtgtacaatatacacatatatataatatgtgtgtacaatatacacatatatataatatgtgtgtacaatatacacatatatataatatgtgtgtacaatatacacatatataatatgtgtgtacaatatacacatatataatatgtgtgtacaatatacacatatatataatatgtgtgtacaatatacacatatataatatgtgtgtacaatatacacatatataatatgtgtgtacaatatacacatatataatatgtgtgtacaatatacacatatataatatgtgtgtacaatatacacatatataatgtgtgtacaatatacacatatataaatgtgtgtacaatatacacatatataaatgtgtgtacaatatacacatatataatatgtgtgtacaatatacacatatatatgtgtgtacaatatacacatatatatgtgtgtacaatatacacatatatatgtgtgtacaatatacacatatatatgtgtgtacaatatacacatatatatgtgtgtacaatatacacatatatatgtgtgtacaatatacacatatatatgtgtgtacaatatacacatatattatgtgtgtacaatatacacatatattatgtgtgtacaatatacacatatataatatgtgtgtacaatatacacatatatataatatgtgtgtacaatatacacatatatataatatgtgtgtacaatatacacatataatataaaatatatgtgtgtacaatatacacatatatattatataaaatatatatgtgtacaatgtacacctatatactctatatgtgtacaatgtacacctatatactctatatgtgtacaatgtacacctatatactctatatgtgtacaatgtacacctatatatactctatatgtgtacaatgtgcacatatatactctatatgtgtacaatgtgcacatatatactctatatgtgtacaatgtgcacatatatactctatatgtgtacaatgtgcacatatatactctatagagtatatatatatactctatgtatattctatagaatatatatgtgtacaatgtacatatatattctatagaatatatgtgtagaatatacacatacattctatagaatatatgtgttcaatgtacacctacagaatatatgtgttcaatgtacacctacagaatatatgtgttcaatgtacacatacagaatatatgtgttcaatgtacacatacagaatatatgtgtacaatgtacacatacagaatatatgtgtacaatgtacacatacagaatatatgtgtacaatgtacacatatataatatatatgtgcacaatatacacatatataatatatgtgtacaatatacacatatatatgtataatatacacatatattatatataatatgtgtatattatacatatatgtgtatagtatacacatatatattatataatatgtgtatagtatacacatatatgtataatatacacatatatatgtataatatacacatatatatgtataatatacacatatgtattatatataatatgtgtatattatatacatgtatgttatatataatatgtgtatataattgtatataatggatataatatatactatatgtatataatataccaatagtgtatataatatatacgtatatatattatatatagtatataatatatacgtatatatattatatgcgtatatattatatacacctgtgtaatatatgcatatgttatatacgcatatgtaatatatgcatatattatatacgcgtatgtaatatatacatatatatacgtgtatataatatatcatattatatattgtatacgtacataatatatcatatataatatacgtatatatcatatataatatacatatatatatcatacattatataatatacgtatataatatatcatatattatataatataagtatatcgtatatcatatatcatatattatatatgtatataatatatcatacatgtatatattatatacgtatattatatatcatacatgtatatattatatacgtatatatcatatataatatatgatatatacgtatataatatatacatgtatgatatatgatatacgtatatcatatattatatattatatacgtatatcatatataatatatactatatcatatatatgatatagtatatattatataatatattatatataatatattcacatgcatatatatgtgtatatatataaagtatatatacatataaagtaagcaaaaagtatacatatgtattatatatagaaatatatacatatacataaagtaagcaaaaagtgtatatatactatatatataatctacaccattgcttcttataggtaattggattccattttttgatgtcccataatttatttgacccatcccttagtgttggaatcttggatgttgtcttcacttttcttcagcagtcctctgatgaaccatcttgtccacacgtttttgcacacttgactgattattttctcaggatcagttcctagaggaattgtctggtcaaaaggtgtgcacacttttggtgcctatggtccaatacggcctatggaaatttgaattcattgaaattctcactaacaggctgagaatgtgacttcctgactcttttgccaacatgaggaatgagaaacagagtgtacaacatggctttctttaggcagacctgccccccaaacaggtggtgaacaaagttccttcagcatattgcctgtggatatcagaactcagggacatgcaggtgtgagctgcgggcctggaggtgtccctagggcccagagagtgcctgggcagccgacgggaaactggatggactcagaaggagcaagtgtccctcaggatccaggaatcaaagaaggcctgccgcttagtgagccagcatcaagagcctgtcactcaggccacatgcctaagatgcggtttgactctgagtggggcatgccccctatttcagggatagcctgggagagaggatcaacatttgggaagtgcttggagggtgcaccaaccaaggctgacccctgagctggtccatgtgtccactgtgagcacccactttcttcccagtgaatgccatctgcctactccaggaactctagggtggtcaccagggcaaggagtgggggtgataggaatgggtcctggctcaagtcccactgggccatggtgctcttcttgacggccagactgagagggccagttcagttcacccagcacatgccaggtgcttggaagacaaagaaatgcacctcgagacccttgctgtctccaaaatcttttccagcaagtccaggccctcctgatctttcccatctctgaatcccaggggaacttattttcagccccttctttattcttacatctcatgaccaatctttgtgtacatttattatctctccagtgacataaactcctcaggggcagtgtcccataaggggcacactagtcatttggagggaagccattgtaaaccttgataagcatgaagaaatctacaaatgaggagtattccagaaaaagcctcggctttggggaagtaaataataccaggagttactgagctggacacagcacacatacactgagtctttacaacagtcctgcctggaagatgttatcaccaccatttcatggataaggaaattgaaactcaaaaagatgtgaaaattgtctgaaaccactcagacctgtctgatttcagaacacaggtgggaggcctggagtcagtcccaggtctgccattaaatcacaatacctccttggtcaggtcactacagcactctgcagctccgtgccccaggatgcagctttttcgatgaagtaaatggaattgcatcccccacccaggcttgctgcacagatcatggcatagcattgacaaatttcctagcagttcatcagagatatgccaataattgatacctgctactattactagtaattaccgggaagccagtattgcaccaagaatatttgcaaacccaaggatttcttcttattggacacagagattgaatgaatgctagcgaatggaattgtgcagaagacaaacaggagtgagggaaatgctactggataagcaggaggttaaataaactgtatctccttttgtttagatgtgaatttaagaataatctattttactttgtcagggaaggaaaggcctaaaagggagactaaagatgagttgctaaaaaagagagaacagaagcaaagagaccagaaggtgagtgctgctaaagcttggggtaattcgttaggcaggattagataactaatacatggtgtgaaaaatatcgttgcattttgtttttgcatgcaaatatctaattgttttagcactatttgttgaaaagactacccattttccactgaattgcccttgtaccattgttgaaaataaattggccatatatgcataaatctatttctatactctctatactgttatattgggatctagttgcttatcttgacactaatactatgctgtcttgtttgctgtagctttatcatcggccatgaagtcaggtagcacaggctctctaattatatttttctaagttgattgggctattctaggtcctttgcatttctatatgaattttacagtctgtcaatttccacaaaagcgctattgggattttccttgggactgcattgaatagacaggtcaccaaggataacatcaagaccttgctgtgtcaggccagctcctagcaacactgcagcccaagttgggagcactaggttggctcctggatgtcagtgactgctcttctcttccttagctggaaaggtactgggaaaaacctccatagtgtattttggtaaaggtatagtataatctttgtgggattccgaacaaaatattataagaaacattcatttgtgcccaagggccataaacttggtgtaatctgaatgcaataaattataaataaatggcaaacagttcttgatggttttctcttaatttttcaagttttaacatagagcgtttacaggattcaccttcctgatttagggatgggaggggggttgagaaataattagtaggcaattttttggccctgggacttttcttgtaaatgttttctttggcagccatactcttgagaacaggaagttactctcttgttacagatttaagacttttctgagccaaataacagaaagctggattagttctgaaatgaagtggggggaaaaaaaacaactctaggctcttgctggagattaatgacatcttacaaatattttaattctcccctttcctcttaacttgctacctcctaaacaaaacacactcagactgaaaaaaaaaaaaaaacaaaaaacttaactgatcactttgtagcccaaccttaaaataaaatatctttatggtgcccacaaatttatgtaaacatttttggggtgttaaagggaaggaaaatagggctgtcttaagtcgatcctttttttgttacaaaatccccaatatgaaatttagagcataaaatgtagttgtaaagatgctaatttttctatgataatcacacagattcataattttctttgatctttttaaaatggcttttaaaaatagataaaagtgtttaatcaagctttgaaaactatgcctatatgttgtttgagatggttgcaaacaattctttagaaattgttccaaatgacaggattatatcctttgactagagcatctctgactataaaacaaaggaattatttcctccaaaaagactgagtcctcacagaagggcatgctgaggtagaaataaaaaaaaattaaatttttacacttgattctaaaaaaaagttgtaatcttaatgaagttcataatctggaggaacattaattccgtgaattatctgagaactatttgtgaggattgtttttaaaattgctttaaatgtaaaagtttttattttttgcaaggattcttaaaacacagaaggccttataaaaactttgagattgagaagtaaagaacgctttcctgtaacaagtatatatcttctactagtaatctaggaagtttctatggtattaattgcagcctcagaaaataaaagagttggtctaagtgttttatttgcacttgcctcctgcacccaaattcaaatgccctggtacccaagaagtttgcctatagttgagaagggtaggataatagggccagtagctgatgggagcaggggaggatgcttccctgggctataagaacatgcctatcctaaagtcactcaaattcctaagtctgaaaaacactgtgctgccaaacacacccatctgtaatttgaatgtggccaaagacccacaatttgccacccttgacttgcattatctaatgtttttctttctgtatattatgaagaggatatttattccttcatactaactttcttcagtctgcttgaggtgatgcccttccacatcattcataatagtttcttgtcttctactattattgacaacttcacttttttaaccttataaacaattttaaattactcggagctgtcatccattagatataaaaattaaatggagcccaggaattctaggtgatgggaaacattatccagggctgtaagacatgcacaactatgggagtccagcaaaggctgataagcctggagctccagcaatgttgggtgagcatttatttaaagggagctacttgcttcctggtttgactgcataccaaatatatcttctcaacatttatgagcttaaatagatgcagatgttgccagagagtgtattgtaacattcatcatcctagaatcatataatttaagtgttgagaggcatcttggacttcggttcaatactctcattttaagcaggaggaagctgaggttcagaagagttaactgacttgccacaaagttagtggtccacaaaccctgccccataaaaacattgttgagggttgacaaattttactaccaccacctccgttctctcatctggattgctttaattgtcctatacactatgcttgactattatctcctcccaattttcaagaagaaaattaatgagaatttttttttcctgaataattcttctttatatttcgtgggcatcccttacttctctccatctccccactgttgatgattttcagagctgtgttctttctcatgtaagatggaaattaaaggtgaccagacactgattttggccaggtctagtgagaggagaggggttagtttgttttctctaactctagcctgctgctgatcactagtttatttatttcatggcctctgatggacatcagactccaaatagtgagagccatggtgtgctgacactgtagcagaaatcagttctttccatccactaaaaagacaactacctccttggtgaaacctgaaatgatcttatgaaatctcatcctgtagtgactttgcaaattacctcactcctccttttctgttttctcataaatatatgtgcagactgtctttcctcaaccacaaaggaagtgtaaacatagtttatctgatgttttatgaattaaataatttctatagccagacttatatgatgtacttgatgttttatgaaaaatcttcagtgaggcccatttaagtgtaggacagtctgccctccagcatagaatttgaaccaattctaagcaaagtttggctgttatatcctcctactttcctgccctacatactctccaaatcctagagatgagtactctggggtcttcctattatcctaaactcactgatgtaatagtctgtctggtgtgttcttcttctcagattactcaaaattctctccattttctccctttccctcctgaacaaatttcactctttgggtttaggtcatcatctcagctaggctgttatgaagaagcattttggaactaaataatactcacgtgtaaatgactaatagatcatttatgttctcaaaggaagatctttgttcaccatataatcttcttattggtggaatttcactcaatgtgtcaaagggaaggaaaataagtcaaggagaggggaaggtatttttaatcttgtttaagattttatgtcttaaactgagaggaggggccttagctacaatgtctatatagtctgtgtcaaagaccgtgtgctctttcaaggatttttttcccagtttgtgagttttttcatatttaaaaatcttacaaagttttattattcaatcacaattcagttggtcacatatctaaccagcaatcttcattaaatttattaaaaagtaaacttacatgaaatttcagagtaccaaacatttaataatttaaaaaactatgtcttcccacactatcaagatcataaaacacagtggtggcctgaaatgggacattcgtcactaaaaaacacttcagccatgtgacggtattaacagaaaagggttcttttccaccaacttgaacctcacttggctgagattttctcaccacagtctttgtatttttttttcccatgggcaactgcccccttgattaatcccatttcccttagtcctagtttttccaggcagctgagcaaacaaagatgcaggcagccattttaacgtgcttcctccctcaagccctctgggatgggccgtctgttcatcctgttcataaaccaacggcctgaatgggcttggagaaagcagcaaggatcttctgtcaggattaattttaataggccatagtctgtcacccgggaaccatagcccaggcaaatggctttaaattactatttgctgataaaaagggagatatgagctgaaaatttggttcctcatttaaaacaacttggataactaatgcaagaatttacttttagtgtggagtgcaggtactttacagcctaaacccttgggtagctgaggaaaatcttttgttgccatgggatcacagtgaaatataaagaggggaaatgtggcagtttgtagaagtatagaattttagagctggaagggaaataaaaaatgtatctgtgacttcctaaggacttacgtttagagctttatatttctgatttctgtgcagagaaacgcgattcctcttattgccccttctacttttttgtctccctctttaccaattcctttctctttcctttttttcactgtttttctcatacccaattccagttccttgttccttcccttggttcctcatccctcaccagccaggctcctgtcatttctctgtgaagctctgcactggggggcacatgaggtagcgtggtgaatgtagcccctaggcaaacaagtcaggaggccctagctcttgtctcttcccttgtaaagtgtgagaaggcagtttgggggactgactggaagggatggttttgtaaaatgacacactgatgtcagccattattgttcaataaagtcctctgtgtaccattcataagtaatttttttattagctatggccattgttttggtttgtttaaaaattcagaatgtggctgggcatggaggcttacatctgtcatctcagcactttgggaggccaagatgggaggatcatatgagcccaggagttccagaccagccctgggcaatatagccagaccccatctctccacacacacacacacacacacacacacacacacaaatcagctgggcatggtggtgcacaccagtagtcccagctacttgggaggttgaagcaggagtaacctttgagcccaggagtttgagactgcagtgagctatgattgtgccactgcacttcagcctgggtgacagagggagactctttctcaaaaaagagaaaaaaatcagtgtgttccatactcaaatggatgcttccaagaaaaatcatggaagaaaatagaatttgcttcatacttctttatgacccttggttcccatctcttcctttccagccagctcccctcaactctcatagatcatatcacttgttcatggagaaaatgttctccacattcctttacaaacatgactgataccataaaaaatgtttggtgcaagttctgtaatctttcttaaatagcccagcctgggcacttgagcaagaaggctggtggctaaaattaaacaaaacataacaaaaccaaaaacaggctgggcgcgatggctcacgcctgtaatcccagcactctgggaggatgaggcgggcagatcccttgaggccaggagtttaagaccagcctggccaacatggcaaaaacctgtctctactaaaaatacaaaagattagccaggggtggtggtgcgcgcctatagtcctagctactcgggaggctgaggcaggagaatcgcttaaacccgggaagtggaggttgcagtgagccaagatcatgccactgcactccagactgggtgacagagcaagactacatctcgaaagaaaaaaaaatgcaaagaacaaaaacaaaacccaagtgtcaatgaagatgttgagcaacttcattgctgatagagtgcaaaatggtatagatactttgtaaacaatttggtagattcttagaaacattcatttaccctatgacctagttatcccactcccaagtgaaatggaagcttatgttcatgcaaaaacctatacacaaggtttatagtgacttgattcataatcagcaataacttaaagcaaataaatacctttcaactgtttaatgtataagtaaactcctacaatggactactatacccatagaatacaacactacttagcaataaaaaggatcaggttactgatacctgcagtggcataaatgaatctcaaaaccattatgctaagagaaagaaggcagattcaaaaggctactgtatgattctacttatatgacattctggaaaaggcaaaactctaggacagaagacaaaccagtagttgccagggataggggttcagtggagaggctgactacattttggggggcatgatagaactgttctatatcatgattatggtggtcatcacaaaactgtatgcatttgtcaaaactcagacctgtacactaaaaagggggaattttactacatgtaaactatatcaataaatctgacaaagaaaagaaatatacagtattaatttgcatgttattcattttaaaataaatggtattgttctgcaacttgcttttttcacttaaccttaagttttggagattaaaccttgttgaaatctgtagatttagttccttcattttaattgacgtagttttcaatttttgctaccactataaacaatgtggcaatgaatgttctgacacacgtcttctttagtacatacaccgagtttccttaggaaggctagtacataaatgctgtgtgttggattgcagagtaggcacgtcttccagtttactagatgtgactgcatatctttcctaagtgtttctgccagttcagtctctgtaacacatgagctcctgtttctccaatcagaaagagtttggaatttttaagatttttttactttgcatttccctgaagttgaggatccttttttaaagcatgttttctggtttttccagtttcctcttctgtgaactgttcgtatttttcctttttttttttctgacttgttttgcttattgatgtataagaattctttttgtaaagtgtgagtttttgtattctggatgccagcttgctgtttatatgtataatagcctttacccttctacactacagaagtttttgccttaatgtagttaatttacaaattatttcctgtaaagtttgtaaaatgtgtcttaagaaatccttcctaaacttgtgatcattgaaatgtttttctgtaaatattatttttcaattttaaatagtagtttgttaattcctctggaattaatcctcatgtctattggaagtaggaaactatttatattaatactttttcccatatacacaaccaatctctctagcactatttatgaaaattcactctttcctcactaatcttaaatctcaaatcaagttcccatatatgcatgggtctatttcggtgttctctattttgttccattggtctatttgctgcaacaattatataaaattaataaaatgtaattaaaaggccaggcacacagtagggccaaagcaaaagctagcttcccccactcctcagtcagctctctaaccctaaagtctggtcatcagtgaagtcttggtttttctaaaagaatgatgctgtttggctcccttgttggtgatctttattcccactgacttcatctggtccaaatctctggccagcctctcctttaaattcccttttggtactagctccccactaatcatcaatctgctgcctgcatacccccaacttggcccagtgtcactatggccaagtctaggcatagaggctggacatgcttctgcattgccccataacacccccaccccctcattctccagcaatccccatgtggcggtcgggccatttctcatgctgagaggcccaacaagtgtgaagttgaacactttcagtctttgtacattgacactaatgtatcccacattagtaatccaagtgaaggaagcaaaattaaatttcttaaagaaaaaaaggctgggtgtggtggctcatgcctgtaatctcagcagtttgggaggctgaggcgggcagatcgcttgaacctaggagttcaagtctagcatcggcaacatggcaaaaccctgtccctacaaaaaaattaaaaaaaaatttagcggggcgtgggacacacacctgtagtcccagctacgtgggagggaggctgaggtgggaggattgtttgagccaagaaggctgaggttacagtgtgccgacattataccactgcactccagcctgtgcaacagagcaagacccgtctcaaaaaagaaaaaaaaggtcagaatttaagagaggaagagagggtcgaaggagggaaatacaaattcagttttggacaggttgagactgagaaacctttgagacattcaggtggtaaggcctttaccctgactctaattctagtcccagagcaaaaccccaaaagactcctgtgcttaaaagcctggagagattggtaccttggaatttatggtaagagagagttttaagagggagaaactgctcaacagggtcagatgctgtgagaaggggaaggactaagacatattccttgaatctgacagccatgaagggatccatggtgcttgcaagatggtgaagaaatggagtcagagaatgtggacaattcttttaggacgcgtatctctgaaaaaagaaggcaggtggaagctgggggcagcttttaactgctttattggggtataactgacgtgctatacactggacatatttaaagtatacagcgcaataagttttttttaattttctctttttatctctagaagtaagttttgacttatcaaatgattacacccatataaccatcaccgcaattaaggtattgagcatccccgtcactcccaaatgtttcctcctgcccctttgtcatccttcctcccagcctctccctgacaccccacaacatccgataatcactgatctgctttctatcactatagatgcgttcgtattttttacaattttatataaatggagtcatacggtgtgtaattttttcctggcctctttctcagtatactcgagattcatcagagttgttgcatgtaccagagtattcgatcatatgcacagactacaacgtgtttatccacttacctactaatggattgtgtcaagttttgggctattacaaataaagctgcaatgacacttatgtgcaagcctttctattaatatatgctttcatttacctgtttctcttaggtaaatacctagcagaagaatggctgggtcaaacggtatattttaagaaactgccaaactggtttccaaagaggttgtactattttgcattcccattagcagtgtatcaaagttccagttgctctacatcctttacaacacttggaatggtcagtctttctggtaggcatgtactaatatctcattgtgattttattatttattttttcttggatatagagtcttgctatggtgcccaggctggtcttgaacttctgggctgaagcaatccttccacctcagcctcctgagtagatgagattacaggcatgagccaccatgcccagcttctccatgtatttttaatttgcattttcctaatggctaataacactggtcttctttcatgtgcttatttttcacttatatatcttctttggtaaactgtcttttcaaatcttttattccctaatctggaaagtggtgcccatcacttctaccatatttattagaagtgagtcagttaagtccagtcaacattccatgggagaggattacattggagtgggacactgggggccatcctagaggctgtctaccacgtgtggcttcccatttcttttagggtaaaatccaaactccatatcctggtctacaaagccctgctagatctagccccagccttccacattgcttttttttgttatttgaacatgctaagctccttctccttttacggccttagtatcttctcttgcctctacttgggatgtttttccatcagattttcccacagttgatcatttgtcatttgaagtcccagcttaaaagttacctcctcagaaaacccaacctcagtcacccaatcaaagtagtctaccagtcactccttatcaaatcactctgtactaattctctatgtgactcttagtactgatagaataaaagtttcaatgtaacaggaaatttctttacctcattcatcgttatatcaccaaatcctagaatagcgtttcacttgtgatagacgctcaataaatatttacttactgaacaaatgaatgagatctccaaagaagcaagaacagatgggatccatagtatagctgaagggattaaccttggataaagttcctgtgactactgctgtttaataaacgaccccaaatttagaaaaggcatagtgaagatgtctctgctccacaatgtctgaggcttcaatttggatgtcgtgaaggctggaagtgactggacagttggggctgaaattatccaaagttttgctcactcacatgtctggtggttgatgctacctgttggctgaaacttcagcttgggatgatagccaaaacatctacgcaaatgcagacttcttcatggcttgcttgctgagttccaagagtaagcacttcaagaaagctaggtagaagttgcatcaccttttgtcatctagactagaaaaatcacttttgctctagttataagcacgcccagattcaaggatagagaagaataaccccatttcttgacaggaggagtgttaaactcacatagcaagaagaacacatttaggatgggaaatattgttgctgccattctggtcaactccaactatatcatggccagttttgtggccattcatgccccaacaatgacaatcaaagcaagaaaacagaggagaacagcctggaaattctaaacatttatgtttatcagttttacaattgattgtcagtttttatcttcaactaggtaaggacaagtggaaatcattcccaggtcttgtttttgttcagtgtccttgtgtagcttcgtggcagtgggatgtctataggtcatcttggcagcacctcacgtgactaatgaaattttcctttcccttaattctgttttgaattttccttcctttcaaacgcagccaaatttattagtttactctgagagcaacattcaggagattaatccaagtaccactggaaaagtgattcatctttttaatgagcactgaaaaacacaaacaaaaaaaccccaaaacacttgcccagattcatttttataacggatgggctctttgacaggcaactggaattctttagcagagattagctgtctgtggtttgtgggctccatttcctttcaagtgtttggttcagctgcaaacaggtataacctgtagcactcattgtttctctctttagtcttcatttctccattgttaaatttctccattttatatcttcttctctagacactgctgtgaaaatttgtgtcctagatatttattttttgtttcataaattataaaagaatactttgcctattttccttttgaagtgtaaataggctgcaagtagtctgcttctgttgtagagtgatgttttccacttgccatgcttcctggttactgacaaaattagacagtttgtgcttggatgctggtgggaatttagatctgtattatgatatcttgaagccctaagccatactgtataaaagattctatcccaaaccactgaaaaatctacacagtaatgatgattaattatataaaaagcttaagatttgcatataagaaacatttcattaagagaaagaggaatatgggggaaaggtagagaaaaaaatatgagagaaggagattgtgtcaattactacatgctatgttcctgagaggagacagaaaaagtacaattatagctccctcacagaaaggactttacaattttgttaggaaaggaaaaagaaatctcgatgcataacacaattagagaagtataatatgcttcatgcagtgaggttccaactttaactaagccctataattgtgctgaaaagaaagagaagtttggtttggaataacatgggaaggttcagggaggaggtgagacttcagccaagacttacaattggcaaggggagaagagatagccttccacaaaagggtaacagaagggggcaaaattctgaggcctaaaagaaaggcatccttgccttggggacacctgtggcctacaatcagcacatggggagttcactactgtgggagaaataaaggcctccagctggggtccaggggtggggtgagggaggcttgcggggtgcttatcactgtaaaccaaaaataaaatttgaaggtccgccctcaaccgtctgaatggacttcctcctgtagtccagggtcctccaaatttaacctaaaagactggcttaggccatgatgggaagctgaggtcagacatgcctcattatgcccttctttcttttagaatccaggaaaagctacacagcatttaatatcaacacatataccttgagtctgataagaaacacaacttactttctctgaagcctgctaactggaggcttcatctgcatgataaaatttcggtctccacaagttcttatgctaacctagacattcctttaaatcaattaccaatcagaaaaaaacttaaatttacctataacttgggagcccatcttgccccacacccgctctgctttgagttgtcccacctttgtggattaagccaatgtttatcttaaatgtatttgattgatgtctcatgtctccctaaaatgtataaaaccaagctgtgcaccaaccaccttaggcacgtgttctcaggatctcctgagggctgtgtcacgggccatggtcactcatatttggcacagaatacatctcttcaacattttacggagtcttttttttttttttttgtcagtaccacagacaaccacctgactcgaggaccttacctatttctcattcagccaatgctgcagcacgttattaacgtccttgaaagcaagtcttatacagagaaaacttattttgatatattaatgaatctgatcagaatggaccagattggggggatagataaatggttgcaattgtgctccctggaatagctttggagtttacctagatcttctgtctctttaggacagagctgcttgtgtttatatagcatcttacacaggattgagacaacttcaatttcctatatcaaaaaatcgggggagggcggtgggttatgggggtgttcaaacctcccaagtgacatctgctgtgactgcatgtcttcctactctttccactgggatgcacctctggtagctgaactataacgagaaggtaaaagctgtgtccaatacctattaagctgccttcttctcaacagctggggaggtggcgggggtgggggggggcggagggaagtcttttcaacagttttacacatttggaaataggcctaaagtgaagaaggggattttcaaattggtgtgttggaaaaggggctgggcttttgagtttgaaatctggtgctgtcacttactggttttgtgccctgggaatatttatttcagttttcatgcctctgtttttctataggcaaagtagaaaattcgaaaaggtcctcaacgagtttgtacagctgctcccactccctcatcacctcttgtgggcctttggaaatgtatgttggaggagacattttggattgttgcaatgacttgggagtgccatagcacctagcaggcagaagccagaaacaccaaatgtcttaacaatgcttgaggcggtgctacaaatgaagtccttctccaaatgcattgagccccaagaaaaatcgctgattctgaggaaccttccaactttaacaatttcaggacgtccctaagctgagctaggaggcaccacgcacaggccggaggcaccacgcacaggccagagtctcccaaatcctgtcccgcactctctcccaccttattaatggccagctcatctttcaagtttcgacttgaaccacttctcagagatatcttcccaggtgcccatcccaacgttactattatatcataatttgattctccctccccccatccccccgccaactctgtaaaccccaagtataacacaggacgttgctatttgttgactgacacatagtgcttggtgaggtcacgctggcgctgaatactttttgtataaaccgacgaacagctgatgaccgcatgaatgctcacacaaggggaaagggcgccaagccaaggagccggcgtcatccgacgtaacttccgccctttaacgctcctgcggacgcccccttctcccagtccgtgtttgtttccggaatttcaataaagctcgattcggctcgaagaagaccccgttcttccgggaaaatggcgactcccgctcgtgccccggagtcaccgccgtccgcggatccggcgctagtagcggggcctgccgaggaagccgagtgcccgccgccgcgccagcctcagcccgcgcagaatgtgctcgctgccccgcggcttcgagccccaagctcccgaggacttggcgcagcggagtttggtggagctgcgggaaatgttgaagcgccaggagagacttttgcgcaacgagtaagctggggtcccgcggagtctccgccaggctccttcagctcgagctccctgggcgctcccctcccctcccgcactctgttcccttccctggaaggtgactttgactcagtcacattcgcttcagtcctacgggcgagtggacggagggcttgctgcggcagagccgtgcctcttcctggccaggcacgtatgcctgcgaggatagctcggattgaacggctacctggcgttgcagggagttagtagcccctggtcggttttatttacccggggactgtggtggttccatgagtctgctttctaaacccttttgtcgcccgcacccctaacccataacagattgtcagcttcatctctggattctaagcttacaggaaccgtaggaaatgggaagagtgggatatgaagaggggtttattaggccgggaaagttcgaccctcattcagctggctggttgaacggattttagcaagggagccacgtaataaaagtgattttgttttttaggcagctttgttcagcagcttgttgcaaaagatggtttgaaggaataaaaagcagaagacagtagaaggatattttcagagagacttcccacgagacacttgtaagaaagtgagctaggaagggattgggagaacttttaagcatggactaatttaaatgcagttgacagagatggctgaagtttccaatctatatggaagaccactagcaaaaataggaaaattcagggagaggaatagatccaaggttgattttacttagggtgtgcagagttgagaggagagcaggacagacatttggttaatcgaaaaccaaacacttaaaagctggagaagtagtcatgaggctcaagaaagagagaaccctggaaaaatacagaaaacaggaatttcagctgtagagtgttgttaatagttgaaattgtggggatgaatgtagtgtcaaaaagaacagaggacttaaggtgtaattttttctttccatttattgtatagttaaagaaaagggaatcagaaaaggaactctgtcatccagcaaaagggacaaataaataattggttgggatcaagacatgtgttttgaccttgtgagaataggttttgaatgtatagcagtgaattaactttttggtctcaggactccgttatactttaagaattattgacatcccaaagagctattttatgtgttgtatctagcgaaatgtatttacttatcagaaatacgtctgaagtctttaaaacataagcatacacaagcacacattctattctagaacaatgatgtcatcacatgccatgtagcctctggaaaactccactgtacccatgcgagaaaatgagagggaaataatatcttagtattattatgaaagtagttttgacctaataggcccatccccacactccaccccatccccaaattttggagattgcactttaatgactgctggttcttggaatgtcttatgtgattattatatgcttaaaatacttttgctgaaattctaatttgctgagacaaatgaggcatatattccctattcttcctgcattcccttgttttttgggctatttggataatgaccattttaattgttttattcttgttttggggcagttagaaatcagatatttgacttaaaaatcagcttttctttctttgaagataatgccttgcctttttaatgttatatctcaagttaaaaaaatggctgtaatgtaatagtattcttttccatttgacagaaaattcatttgcaaattgcccgacaaaggtaaaaagatctttgactcttttgccaaactgaaagctgccattgcagaatgtgaagaagttagaagaaaaagtgaactgtttaaccctgttagtttagactgtaagctaaggcaaaaagcaattgcagaagttgatgtgggtacagataaggcccagaattctgacccgatacttgatacttcatcactagttcctggatgttcctctgtagataacatcaagtcatctcaaacctcacaaaaccagggacttggacgtcctactcttgaaggtgatgaagagacttcagaggttgagtacacagtgaataagggcccagcttccagcaatagagacagggtaccaccttcatctgaagctagtgagcatcacccgcggcatcgtgtttcaagtcaagcggaagatacttccagcagctttgacaacctgtttattgacaggttacagaggatcaccattgcggaccaaggtgaacaacagtcagaagaaaacgcaagtactaagaacttgacaggcctttccagtgggactgagaagaaacctcattacatggaagtgctagaaatgcgagccaaaaacccagtgccccagctgcgtaaatttaaaaccaatgtgtaagtaccctcggaaacaggcctgtaacaggaacgtgatatttgttaaactcaaaaatttacgagaaactgggtgtggtggtgcttgcctgtagtcccaggctactcaggaggctgaggtgggaagacagctttgagtccaggagttgtagaccagcttgggcaatataataagaccttttctcttaaataagtcaggagaatgctctaagttccgtgggctttgtatgagaactacttgtagttaggaaataacatgttgtggcaacactgagaccagcctggccggagtagaagattcatgttgaaaaatatttagttttgaaaccaaataatcgacaaggtcttttaaagcacatgggggagtgttaaattttaggatgcttagccagtatttcataataaacacagagttggagagaatttattatgacttctttttttcagaaccattttttagtgtacagctttgattagtgtactatcaaagtgtactctctttgattagtctgtgaactaagggtaaagcaattgcaggagctgatgggctttccagcagaaattatttgcatgctcactgtatgtaagcaagcagcaggtgttgtggggacacaattaagtcaagattcttaaaactcctttgccttttttgatgttaaatctcaagtttaaaaacatggctgtaatgtatacatgtgtaatgtaatacaataccatgttcttcaaggagtttaagagctacatgaggacccaaggtttacacacttggaaaagagttaagctacataataataacagtttcagggggaaggaagctgagaagaggtttgaaaaactgtgaaaatagattcaggcaggataggcaaaaactctgcttatcagttccttgccataaatttgtttctgaaatttcaggaaaagtaaaatctttttgaaaataattgctatttacttgcagcaaatgtaacattcaactcaggtaactggtaccttcttcctatattgtatttacaagtatgtaacatcaaagttaaatcactactacctttctttgaaaaacagaaaacctctagtgaaaagtatctaaaacatgcttcttttttgttagactttaattctaccccagcattcattttaacctcaaaacattttatttctgctgtatagaaaatcaggattatactacattaacgtgatcaagtactctcttgtgtacagtggggtatctttcttcacttccaggatgacattttagaaaactagaaccatcatctagtcaataaataaaacaaagaatacattaatcccagttctgtattatggtcatttagctgggagtgggagagaggtaagggaatagtgaagagggctaccaagaattcaggaagtttaagagacagggagcctcctgtataagttagaggagaacaggaaaggcagggctttgaggagtccttaggccatagacaggtagggattgagagggttccgtgtgagaggtggcttggaggttggaaggtggggtcaggtagtgtcctttgggtcctttctgctcttccttctgcatactcttctggcttcatgtatcacctggatgctggaggctgacccctgtgcacctctatcccagatcttcccagaactttaggtttgcatagccaattaaccatgaaacttgatcacttgggtgttcccaggtacctcagcttaatgatgtacaaagtggaactgcagtttctttccaaggtgatttccatattccctaatagtgccaccaccttctcggttttcttcccctaaggtatcttcgatttttctcatctccatatctgctagccatgaagacctacttatttctttgatcttcatctctataattgttcttcatcttctgtcgaagtgaagactctcatctctctcgggctgtaattgtggccccttctacctctagtcttaactaccagtctatctccactgctgccagagtgaaatttgtaagatggaaatccgaacttgttacggagaactcttcattgcagtctgggcctaggctacttcccagccctctttctcgctgtcttttctgtgtagccagaaaagctgagtctgtctaccttctgtactttctctcactccccttgctgggatgcacttctctccttatttacatgggtaagcagttattattccaagactgttcaaagcttttttgaaacttttcttagcctccctgtctcccactagaactggccatttccttatgttccaatgtatcttgttgagatatctatcacagtatctctggtattgtattgcactgaaactttacatgtgtatttctttctactgggcaataagcccttttgcaaatgttctttgaataaatgaaaaaaaaaaaaaaaactccagatgaaatacaaggtttgaataaggaaggaaaaggcaaagagcctgtatgcacacaaacacacccctatttgttagagcaatgaatactggtaaattacttactgttacctttggaggagaattaattgctaaggtaaaggccatttgtgtgaatgttttaaatgtgtctacaaataaaataatctgattgtataacacaagttttcctttcatcaggttaccttttcgacaaaatgattcatctagtcattgccagaagagtgggtctcctatttcctcagaagagcggcggcgcagggataagcagcatcttgatgacatcacagcagctcggcttctaccacttcaccatatgcccacgcagctgctctccatagaagaatccttggcacttcagaaacagcagaaacagaattatgaggtatttagagtattttttttcttgtctgtttgttgggtgctgcttacataagctagaatttactccaggttcaaggaggaaggaatggaatagaggggattaggtgcttccatgagctcagatctatgccactagttttcagagagtcacaaagttgctagaactgcaggaagtagctagagatgatcacagctaccttcaacattaaagtggtgatttgcctggagatgtggggagacttgtagaatttcatgtcttaaagctcatttacctgcctgttcctgttaggatagtagtagcatcgcatctctccctttcaccttgtaaaactcatgtgacagcttctcagtggcggactcaaacccagaccccttgttagagaatgaggagaatgtagttcccaggcttccatcttctgcagtacaggggagggcatagaaggagtgggaggataatgttgtgtagccagcagacagtgagacactgctttagagcataatctgcaggcccatgtgaagagagaaatatctcctgcttttggcagcttaatcaattttgcatagcactttgtttccatgtgttttgcattgaacttcaaacatgtatgttgagagtttgtatacagaataatgggatgggagaaaataagtgtgaaggaccataggggaacagaaaagtttagaagtatttagtaataattttagcctccaggagaacagtatcctgtctcacttcctaggtattgattagctagattttagtcaggtactagtgcaccaactagtataacaccagactgttcaggagttcgagaccagcgtgggcaacatagctagactccatctttaccaaaaaattagccgggcattggggcatgcaactgtggttccagctacctgtggggctgaggtaggaggattgcttgagctcaggaggtcgaggctgcagtgagccgcagtcacaccactgcactctgtatagcctgggtgacagagtgagaccctgtctcaaaaaaaaaaacaacaaaacaggctgttaatctgctttggcttttcataaaagccttggcatggattggcattatcaaggtgctctttttgaaaaaaaccatttttctttcagtgcattaaaatgactgtctagttatggctgtagcattgaggaagtgtttactgtctctgagctcttaaatgcctgtcctaagatatttttaggttgaattaaacccttcatctttaaattgtttttttttagcagagaagttgtagtggtaatagctcccacttttactgacccatattcatggcttgaagaggaggacatcaagaagttcaagaaagcatgagaaaagggaagaactgaattaggaatgacattgccacctaccatcagttggtggtaaagtccttgggagtttttaagtacattgccagtgtctgaaatttacttggactttttattggatactagttgctgtaggactttatttggagaggaatagtcagctttttagtattaatttcttgattttcattttgccattgaaatgtaattcccaagtctggaagtcatgattgtaattagggaagaaggtcctgtcagttgtagaaatctagacagcattagtccttctttttttttttttttttttttttttttttttttttttttgagacggagtcttgttctgtcacccaggctggagttcagtggcgcagtctcagctcactgcaagctccgcctcccgggttcacgccattcttgttcattcttgtgaacccgggaacacgccgggttcacaggcacccgccaccacgcccggctaattttttgtatatttagtagagacggggattcatcgtgttagccaggatggtctcgatctcctgacctcgtgatccgcctgcctcagcttcccaaagtgctgggattacaggcgtgagccactgcaccgggccccagcattagtcatttttgacatttgataggtcaaattgttatgtgagtgtgtatacatgtgcatgtgcccccatatttaacgcatctgtatttataagtattgtagtgctaagctcattactcagtttcttatatagaggagtgtatttcagtgcaatgttgtatattaatggaggtcagtaacttcaactgtagcaggctggtggctgtcagaagcattacccagttgtgtctgatagggcacagccatcaggcttgtattgcccaagggagcactcagtgaggtgtcagtgtccctcttattgctgattctaggtaacttcccattgaaaaattgtaaggaagagatgtgaacgtgtaactttgtgctttgctctttgttttaaaggagatgcaagcaaagctcgcagcgcaaaaattagctgaaagactgaatattaaaatgcggagttataatccagaaggggagtcttcagggagataccgagaagtaagggatgaagatgacgattggtcctctgatgaattctgaagataatctcctaaatcactgacgttgagatgtcatcatcttacatcagactttctaactagtatcaagatcagtgtcagatattgttgagggaagtaattttataaagttacacaaaggtagttataaaaaaagcccagtttgtctttcagaaggtgactttcatgtgcttgaaaagtttaatatttgaatattgtgtttaaccacatggtattaaaattttgcaatatattgtgtattggtctgatattttagtatatagtagaacatactttttttttctttaagccaaatgaaaagaggtaactttgcttttttcctttttcttacctatcaaatagcatttattacatgtctttcagtgaaatacttagttgttccaggcacctaaaatcaattaggaagacatagttcccttcttttttgggtaatgaagggagcagtctaaagaattgtatgcatgtttgcatggggttattgagacattggatgtgaaatacctaggaagacatgtatggagaatgcttaacaaatgctcttctcctttttctgtcttcccttaggaagaacgttatctctcttctgattaggaaggacttcccttttgagtagatgctggaaagtggaggttttttttgttggtttgtttgtttggttttgtgtttttttttgagatggggtcttgctctgtcgcccaggctggagtgcagtggcaggatctcggctcactgcaatctaggtggaggtctttttaaataacctcatgttacttcaggcaaatctggtacaggagaagcccaagctaactgagctgggtgaaggcttgtgcatcacctggcttgagttccttgctgtcacagatgataggttcatgtacacaacattaatgtttgataaggaaagcattttttttttgttaaaattgaattgtcagtactttacttttttccccccaaataggtatatatagactgcagaagcttcagtcccatatataaacgttcatgtcattttagaggattatatggttgtctccagagaaattaacttacattatcaaaaaattctttgtctaatatattggagtctttaaaagtgttgaagaataaaatattaattagaacaacttcaaatgctaaggtgatgttttaccgggacttaattaaatacaactttttcctttcgaaaaagactgttcacatttgcttccaggtgtaattattgctttcattccttacccccctcaagcaaatgtgaaaagtatactgacctaagattctcattagttttagttcttaaaacgaatagtaaatgatttcacagcgtaaaatttgatgttatttctggaagctggatgatatggaagagttcatgtgcctggacacacagttccctgtaatcctgccatctagggagataaactctgttaacattttgatgttgtgtttttgcttatttttctatgcatagttatgcatttatattctcaaaaatgaaatcataatgtacattgctttgtagtctgctctatatattgtcaatatgttcccatattaaatattttgctttttagacagctgtaggatattttatttcatgggtataccataactttaagatttatttcctattcagcaatttgattatgtattataatgtaatctgtaaatagtgatatgattaacatcttaatcacatccatagaaaatgacttatttccagaagataccgctctaaaaatgaaattgttaggtgaaagtgtttttgagaatttttatatatattactcactgcagagatcatgttcatttacattcccattagcaatatatccaatgctcagaattgaaaattactacttaaaatctttgcaaattgaataattacagaaaagggctacatttaaaatttgtatttgtttttcttacttagtgaaggttgtgttttttttcatattcattggccatgctatattcattcttttgagaattgctcattcatattttttctgttgcttgcttggagaatttgctctttttttggcatataagttcttaagaatgtccgtcctttgtcatatattgtaactttttttagccttatttgtcatttaacatagtttgtggtatttcagtatagaagttgttttctttaggagtctacctttgtgtatgtgcttgaaagtatttttgtaatccaagaatggataaatgtccttattttcttctagtattttcttatttcacttttacacctatctttaaaaggaatttaaattttgtttatatacattaactaaatcagtacaagtttggggtgaaaaggaaatttttaatccatctcaaatgtatttggttatattatataaggtagggatttgattttatttcgaagaatttaccaattggttcagtatgtgaaaccaccatttcccctctgattagtaatgctatttttatagaatattaaattcttatgtgtcttttgtgtcttaggccaatttctgggccttctgggttttttctacactgtcaataattatcgctttaattggtgttaatatttggtagtacacaggttctcccttgttcttttaaattttgtgaaatataacttacaaataagtacttaaaacagagcttaatgggtaaagcaacagctgtgtaatcacaaactagatgcagaggaggtcttgccagcactccaaaatctctgtgtgtcccctcttgacactcactgtttcccccagagctaactatcctgacgtatggtaattctccctctgtccttttaagaattattttaccagttatgtgtataacaatatggtttacattttgctcacttttgacttatataaaaatagaataatact

SEQ ID NO: 70 - DNA, 125639 bp, Homo sapiens
  allele (1)..(125639): GRINL1A Variant Allele (rs8037000)
gctgaggctgcaagtagccggcgccgtcccgcgtcgcccccgcgcagggcgggccccgcacgcttattctgcccgggaggaacgccggcgtccagcccgctaccgaccgccgctgcgggatgctgcgctccacgtccacggtcaccctgctctcgggcggcgccgccaggacgcccggggcgcccagcaggagggtgagtagcgggggcgggagccgccgccgtcccgttcccccatcccggccgccccctctagaggggactagggatgggaaagctcgggagccagcacctggccccgacgccccaccctgggctcaactccccggtcctgtgccggctctggcagtgaccctcccgcttgaggtttcagggggcccaccagctggtaggagagggcttaggggactttatggaattcccagagatttcctctccttcctgcctttctgtcaagccgagtttattggcggcaccagtttaaaaatgaaggaagacatttgtgcagtgtccctaccttgagactcaaaagtaatgaatgtatttaaaactcaaactttccttcttccattaattaaaagaaagatggggtcacttgtgtccactagtgatagggtatccactagtgatagggtaattctggagtggggttagccaaggtgggcaaaccagaacagcagccggccgcccaggagcccgactgtgtgggactccggtttatgtaaaccactttcttctgtctgatttaaatattagcacagtgacaacaatggcagcactgaaagcttgggacagcatctccagggaaggtttccctttggaagtgctgtttctttttgatctttgtggcatcttttcccatctctccagatgctctgtaaaagaaatgctccatctttctaacacggtcagcaccttagagccacagccaggggcttggcttgtggctttttagttcttccatttatcatgatgttcaatacttatcatttggtacctctttgctctgattgagacttctgtaatcgtgtttcctcaagatttaaacaggtggttaagtccaaagcaaaacccccactggttctgtctgcgtgcaggcttggacctgcttatttgcttttacatgccttaagcgagtgatggtggtcaccttataagctgtctttcttagctctagaagaaaggtgtgttactcttgggcatgggccaactgatggattctggggtgtgtgtgtgcgtgcactcaccagacacttaggttgtgtacacaggcgcacacacacacacacacacacacacaccccagaatccatcagttggctcatgcccaaggttgacagaactccagttgtccaatcattagcatcatagagtaagatctacattgggtccaagggggtttccaaccacagtcctggccttactctaagttgggtgtttgtatttttctatggaaatctttctcaatttgaacacaattgcaactgagaaagaatgaagtcactgaaaagctaaccctgagccctgagaggatcatatgtgtgaccagactgcatgaattgcatgaaattctctgtaacttcccttccagaggtggggattagttggggtacctaacctaatacggtgggttgatacaaatgtgactagtatacaaataacatttctgaagattttgggtcaaacgtttcctttggaatatttatttaattataggtgctttgctgtcggacacattgtgacactcttgaaaagactttgccttttgaataagatggcagacgtattttggactggagaactcagggctcgggatcaggccattcagggctgtcctgggtacactggtacttgtttctggaaggaaggtatctaaagggtctagggttctgcccatctttatggtttctagctctgctcatgatttgcagatgttacaagtactatctgtgtgtgtgctggggattgtgtgtgtggtgggaagctgtgagatgttgattaattgatttattgaacattcataaacctttctctgtgtggtaaagggctggcattggggtccgccctacctgtagaggcagacattttcccaaactaacatcaaacaaagtggtgatggttatagtggggtgaagagtttacaaagttctgtagaagctaaaataaaggttcttcctgaggcatcaggggaaggcctctcactaaaggtatgtttttttgagatggagtctcactttgtcatccaggctggagtgccatggcacgatctcggctcactgcagcctccacctcccaggttcaagcagtcctcctgcctcagccttccgagtagctgggactacaggcgcacaccaccatgcttggctaatttttgtatttttagtggagacagggttttgtcatcttggccagcctggtcttgaactcctgacctcaagtgatacaactgcctcggcctcccaaagtgctgggattataggcatgagccacccagccccgcctactggtgatgtttgagtttaatcttgcaggatgagtagaatttgtaggggaattgacattattgggatactgaaaggaggaaataaccatctcaatggaatacttggcatatataatcatgtactgcataaccacattttggtcaacagtagccaggatatatgacggtggttggaatggtaggctatctcatatcgcctaggtgtgtggtaggctataccatctaggtttgtgtaagtgcactctatgatgattacgcaacgacaaaaatcatcaaatgatgcatttctcagagtgcatctccacggttaagtgacacatgactactttatcatgatggcaaattggacctgctttgggacaaaatacctattgtttagaaaagcaggaacgggatgtcctgaaagtaaaattgtagaccaaataatcattggaagtgtacctttcattgaaagttgttcagcaaatactgtattgttctgttattcctctctgatgatggacaagtgatggtcttgaacatgttatccattaaaattgtatttctggttcatccaaagagctcatcaaattgggtactgcaggggaaaccagcctatgtgggtccagatattcaagccaaccagaagtggtggtgacagctgacactgagcagggactcctgcgagccagctgccaagggttatgtggctggctggactgccaccagttagcctttgttcaatggctgccacctgcaatttgtatttccttcttatctgaaatcacctctcaaggaaaaaaaaaccaacaggtggagagagtaatttctgtcagctgataaacaaagctctgaaaggcatttatggatgccaaccagcagaagttgtgaaattaaaaaaacttccttcaaaccagttgtgcactaaaaatagttttatctatggcaacagcaggaagacaaattgactggagaataaccacagccagaagatgaccttggggaatggggggaaacgattttaaaaatattgaccttgcttcatgcttttgaaaggaattttataaatgccagttagtcttgctaaatgggcctttgaaatggaaggttggttgtgtggctgggtcgtgtgctttgcggggaaggcatgtgttgctttatggcttccccacaaagcacacaaccgggtcacacaactgacctttcggcacaatacttactgccgagtatttttggctaagctgttctgatcctgggctgtggaatgatagatctgtcaaggatcttctccagcaccttgctctcttgataataaaagactgttggctggtgttgctgctatcgtgacccgtcactggcacagagaaaaaacaaaacccaacaaggtcacaggataggactatctcctagcctgcccttgctgatatttctttctatttggcaaaggcttcctctgttaaacactggaatgggcctgctagtcattgttccttggctaatgtgtccctctcccatgtcccattgctgcctgactgggctaagttgtgagggtttggaaccaaggcgtcctctgggctaagggcagggcttaaacctgtgccggtcaaaaatgatggttgtaggctcagaaaaagaggtgcccagctctatgcttttgatctttcacattgccttgtttgatagaggatgaacagacctgaattctggagactcgtaaggaaacttgatttcccctagacatttatggagatcccatggcttttctacaaaggatatggaatgtgattttgacccatttgtctctgggggcactgatggagtgctgcgtatgaggtccctgttgtagtttacctatgctgtgcatccatatctgaacaagagacctggaggctggtgtcactaagccctggtcactggggaaggctttgaagtcaattagcctcaaatgttcttgtctaattgagttcaaggagctgtgggcccagggctgactaactagagaccatgttaaatatttcaacccaagatacttctcagcactcatcatgccttatggtcttacggaattccagtacttctccagcacacagaagagcaatacagtggtgtttacctctttccctctttggtgagtgatagttcctaagtgtcaaccacactcctggctctttttcactcttaaaggccggggtgatctttctaaaatgctaaatctagtctcctgactcgtctgcttcaagagcctcctcagtactgccaggaaaaagttcacactccttagtgtagcatccaggccctctggtttggcccgtgcctgtgctgtttcccctccctatatgtggtcttctcagatattccaaatcgtttgccatttccccgagctttcgatgccgttccttgcctctttgcttttcttcatgtttctcctctgatgagtgttgtctcctctaggaagcctgccctgaaacctcaaccctccttctcgtgttcccctagaggcctgtgcatgccaccattacttgcgtcacctgtgattacctactggaagacagggcttaggaaccacccctccccaggcctggtggaataggcagttaaaaacagaaatctcaccaggtcctacgtagaggagccacagttaacattgaattggcaaatggaaaaacaggaagagaagccttgggttaaatccatcccatcacttctgacccacctgggcaggaaacgggtgacaaatacatgggaatgctggcccaggtgaggaggttgacagttctgggaagtcctccaaatattcgagttgcctcatcctgctgcacagttggagcttcatccctttggttcagtcagtggttctcaaccagttatacacagaatcactgggaggcttaaaatagccatgtcgaggcctcatcccaaaccaattaaatgggaacatcttaaagtacagaaaagcatgagtattttttaggaagcttcccaggcgattctaatgtgcagcaaggctaacaatatttctttaagcattactcccttctatagctttcttggaaatgcagacactcctgggacagtgttgcagaaaggtcccttgagccttgtgggatgaagggcagggtggtgatggggcagggagggggagtcctcgcactccaagtcacactggcatctttgtgtgccttcatccacctgtgttttctctctggatcttggcgtttggggcacattgtgtgcctagtacagaacacagccacagaaagcaggaatgttttgtatgcctctgagctaagaatggttttcacaggggcctgcaaaacctaaatatttactgtctggctctctacagaaaaagttcgccccaccctgatgtagataattgggctgcaagttcagggccacagcagagccaagaggtctaatctagatggggcatacactgttccgcatgcagcctgctgcaggctcctgggatttgatccttgtgctgagcagagagtgtggggtctgttccccctagccacacttacaagggccccaccttttatcattaaggggagctgggcagggacccacagtcacaaagtggaacaggcctgagagaaatgtaaatgcacttggctaatttccttagggaaatccatctttgtaaactggcaaacccctgtcacctccctgaatcatcttctccactccctttttatttgagatagatatttttcccctgggtgagccaaggtgcctgaagttgagagcatgatgttactggatccgcagagtaccccgtaggtgagacccaggccctcatctccacaaaagggtcagaaacaaggcctgaggggacccatgtagctccccaggggccctgagttgccaaaaagggttttgttgtgctttttcttgtggaggaaacctgaatgctacctgtccctcccttgctatccttcccaggggggttggtttcaagaaagtgcaaggcactccagggagtttcaggtatattcttactttgttttagttcaacctagaaaaaactacaaaacccaacactgagcgagcgcccatcatgtgttgatactatgctaagcaccgtaggggctatattaagtggtgacggtacaaagcttacttgatcactccccctatgttttcccttccgtccattgtgtggtgcatggaacactggaggcactgaaaaatgaccagttggattattgaaatgaactcagatttgaatgttagtctcttcctccaaagatttgaatgactcctcattgtcttctgactagagccagtgcttctctatcatgcatttgtagattgatagttcagcccctatctgtttgtccatttgcctgtcctacccaggcttaggctgcaggttcttattcttggaacttgccgacatctgtgtgtttggcacagactagaacgccttgcctgatagctgtctgctgttgttatgatggtgggttctccaaacctcactgacctgtaaagtcctttctgtccttctatacccagcttaaattgtatcccgagggtccttcctgagggactttcccatatattcccacctcccattaagattagtgttcttcttcctatattcccatgataataaagaatgtttacagagtgcttaatgcgtgccagaaattgtcctaagctctttacacacattagctaatttaatcctcacaacattcctaagagggtatagtattgttagttctttttacaactagggtaatggaagcactgaagactaagtggctttccaaaggtctcaaagctagtaggtgtcagaaccaatactggaagccaggaagtacatttccactatgatttaaccacaaagctatcctgtctctctacaccttgtattggttattccaagtgttcttgattgccttgtttgggtatatttctagattatgtactccttggaggccagcatttttttttttttttgccatcgtcgtaccctcatagtccctaaaaatatttcacaagtaataggtgctcagtaactgagtaataaagtatgctgagtccagcttcctgctttgatctcctggaaggaacccttgcccccagggacagctggttcggtagcagtggtgttcagggtaggatgcagttcttcgcattgtgcataacacaagccctgaaccagctgctttgggaacccctgggaataaagtgccctacctgcctttcaggcactgccaagcctggggcatctctggagattgtgtatccgagtttcaggagaccatggagatcagcctcgtaaaatgctcggaggtaaggaatgctgccttgatgttactcggggagattttcccatggggagattgcggaaggtgaatgaatggagggaggtagactgtactcggacaactttatgggtggttcaggggttactgtccttagtgcttctgttagggattcagagtaccttttagacctttagaatgtcccccttgctgctcctgaagcagtcctgtggaaggattagtctctttctggatctgtctcttcccgacatattttctcccagtctttgttattactataactactattattattttaatcaaaaccttacatatcttaacatcgttgccaccaacacagaaatctgtttccttaagaatatcttccgcctacatctacacaagttatcagggtatatttaaaaaattaaaatgggattattcttaatgttttgttctgcaactttctttcttccccatggccatacatttggctatcttgtaaggaagatgtgtgattctgttctaagctgggtttaaattgctcctgaacagccagtccatcagtgggtcagtgtttattaaagaaaaactagctttgctccttaatgttttgatcaaagcacctctgttgacaagagtaaacttcagacagggtgctgcagtagcctcaagcgcctgctgcaactgccaaatgtctttgaggtcatatgttttattttacaagttcattttattttatgcattctgtttaccttgtggctttgtatacctcagggtattgctcagtgtgagagcttcatataagggttgcccagctcatcataggaagtgtgttgaggaatatagatgggcagatgaagaatgggctcaagccaggggagggaccatctaacttttgagtgattggacccatgggaccccctttctgaaaattatgaccattaaggattacccctctaaaataatcaaccaaccgaaagtcatcacttacagtgttaatgtctctgattcattgaccaaattgttattttcatggaaacaggactgtgaggctaagcaggtctgtttcattttgaagcatataggatgatgataatatctagataatagtaaaaatatctggctgggtgcagtggctcatgcctgaaatcccaacacatttggaggctgagacaggattgcttgagcccaggtgtctaagacccatgtgggcaacatagtaagactctgtgtctacaaaaaataaaaaattagccaggcatggtgatgcatgcctgtggtcccagctatttaggggcctgaggtcggagaatcacttgagcccaggagattgaggctgcagtgctatgattacaccactgcactccagcctgggcgacagagcaagacccagtctcaaaataaataaataatcaaataaaaataaaaatatctaatattcatagaggcttactatgtgacactctccctttatcccattttacccttgagattcagagagattaagtaactttcccgtagacacacagctagtagatgttggagcctgtgtatgtgtgtatgtgtgataggcatatatgtacgtgtgtgcacacttgtgtgtgtgtgtgtgtgtgtgtgtgatgtggtgcaggagaaaaggacttccttttccctgcagaattatgcatggactagacccagcctaataggagattgttgagcaccacaggtttggattgtctctgtggtctgagttacactttgatgcttgtgcaaatgtcagactggtttcaaccagtctgaggggcctggagccagagagttgcctttctctggagggactcaagattccctactcaagatcagtgttgttgcccaccaggaaagagagctacctggtagtatggcttggtttctttttggccaacatgactgacggtgagctttgaaggttgcttgtaaagttggccccacaagaggcaatgatagccctgggggtcaggccacatctgattccggggtccctgggggatgatgcttgccaagaggaggatgaggatggagagggatcttgaaaccaagtcatgtgatttaaagaactggggttgtttcgtccagaagaaaggaagttcaagggacaggaggactgcctagaaaaaggggaattagtttgcagtccgaggacaaccctgggtccattaggtagaaattctggtgtaagctcagatcagcaagttagaggtgcctggtagcaaaatgcaatgccttggagggtggcaatggtgtacgtggaagtgctaacatgggtcccaaacctgggctccctaacctgttcatggaaaatgaacaggttggtgccacctgtcaggtacatttttgggtgttgggtttcttcaaaggtgggcaggttgaactcaagagatttttgacattccctctagccctgggcttctaggctgcagggtggttttgctaagaggccaccctgtggaccagtgcagatctgtgaacctgccaaccagactgggacgggggtggagaggatttgtttgctagggctgccatgaaaactaccacaacgccattggcttaaacaacagaaatttcttgtctcacagttctggaggttagtggcccaaaattaaggtgttggcaaggttggtttcttctgaggtctgtgaaggaactctctgttccaggcccttctccttggctgttgatgggtcgtcttaatgtttatatgatgatcgccctgtatgtgtgtctctccccaaatttcccactcttataaggacaccagtcattttgatttagggccacacttatgatctcatttttacttgattacctctgtaaagaccctttcttcaaataaggtcacattctgagatgccaggaaggcggtcaggacttcaatggatgaattttagagggatgcaattcaacccatattagggagccaacagcactcccgcgaactgagcccacatggcatttcaggcatgtgatggggaccatgagtataagagctaagaaagtaagccccggagactgcctgggttcaaatctcagctctgtcatttcccagccatgtaacccttcagaggcttagcttcctcatctgaaaaatggggcaggtaagagaatctcttaccataggtttgtggtgaggcttaaatgaataaatacctgtaaaacacttagaagatgcctatacatggttagctattactattattactgttattgtcccctcgtactacagattatagtagtccatttttccctctgttgagtaggaaaatgactttgcccctaagtcacccttcgtcaacagaatatgataaatcacacaaattgtagcttctctcactgagtggtataatgcttttttatttttaacagaaatggtgcaatttagactttaaaaaatcatttaggaacctttatccgatatttcagtgaaattttttggcagcctttaataaactgacgtgagaatctcagtgactagtgacaaatattcatggtgacatagctaattaaggagtcagatgtcttaccaaaactcataagcattatattttcttctcctaagcctttccagctaactgtcttacttttagtctgtatccaacaagcagggacagcttttttttttaaattgtagcaatgtacttgtgagatttaccattttgaccctttttaagtgtatagttcagtggcattaagtgcatccacactgttgtgcaactggcaccaccatctatctcgaggatttttttcatcttcccaagctgggattccatgcccattaaatactaactttccctgtatccttaccccctggtcaccacagttccactttctgtctctatgattttgattactcctggtacctcatctaagtagaatcatacagtatttgtctttttgccactggcttatttcacttagcatagtgtcttcaaggtttatccatgttgtagcatgtgtcagaatttccttcctttttaatattgggtaatattccattgtatgtataaataatattttgtttatccattcatctgtcaatggacatttgggttgcttccaccttttggctattgtggataatgctgctatgaacatgggtatatggacttttttgaaaaaaagttgtgattaaacatgtacatgtatattgtagaaaaattaaatatataggcaagtagaaagcaccctcccttcccaatagagatatccactgtgtatattttggcttctttccctgtaactatatttttgcctatacttgtgaaatgagatcattctatacatattcttatggaaactgagccattggtaaagaaatgtttgaaatagatcaagtgatttggtagtttccttccttgagccccagggtggtgggtgcctgtgctgtaccaggctggcctggtactgtgaaggtaaggctggccttatctcctctatggctcctgtatgatcaggacagtgttccccaatggaagtaggggaaatgggctgtgagaagcccaaggtcatctggctctttctgccccaaatgctgactcctaactggcctctcctttccctctcttctaggcaaatgtttgcagactacggctgaccgtacctcctgagagtccagttcctgagcaatgtgaaaagaagattgagagaaaagagcaggtaaggtatctccgaggcaaagccccaacaagttccagcctctatacccttaacccactctcccatctcctaaccaggccattcccagaggctgggtgtctgcacctctgttgaggagaaggccctctcaaccttcccacctcatctcccgtcttcccagaagacagagagctctccctagccggctctgccaccgacgtgccctgctcttgtttcttggtgaacactatggctttgtgttaccttgaagctgcagggacactggtcttagtgacaggtgctgtggcggggaacgtgggttttcctgaaacagcccaatccagttgcttcaaagggcctattgtgagcagctggcggggctggaacctttctcagcagcttggagcagcagccgggggctctgctcccgcagaagagaggaaaggctggcaggcaggctggtgcagggaaagggcactttcttggctgggggtaggaggcattcggcaaacatttttgtgacagctcctgtgctaagtgctgaggccgtgaagataagtatgtccttgccttgggggaatttgcagttttctgggtgagacgatgatgtgatatttcaggtgttaagatccagccctatatgacggaatctgggaacacagagaagggaataactgactgcttgggaggtgacagtgaagttggaggcttgaaggataaagaggaggtcctgctgacctctaggcctgtggtcctggccgacccattttactcattcataattatggggcacctactgtattccaggcactgttgtatacagtgggaatatagtagggaacaaagcagtaaaccaaatctgtcatccatggaacttatattctagtgggacaagaatggaagtaaacaaaataattaagtacattttatagaggttaggaggtggtaagtgctgatggagacaaagtaaaagaaggggtaggggtgccaggaagtaggcagtactttttcttgagcatgtattttatatgattataaagtaaaacaaaataaaatgatataaatttcataaatggagtcataacatagtgacctcttgaaatacaagcttgctttagagttaaccactaatgtggtcaactataaaaaagaaagcttctcatcgatggctaagtgtttgataatgtccctaagtttaccataggtctctgtctctccttgccctctcctccccactttctaccaaggacagagagctgcctgtgctgatgcaaatgatgaatgccagggaaaggaagtagggagaaaagcaaatgaagttctgactagagaaaggtgaggagtaaaattgctgatctgcctaaaaagagtggatgagttccactaaaaagatccagaaaaacagctagttctgggttgcagaagggaaaagatgagggggatatgggacctctggaaaataaggtttcactcagagatgaatggggtcctagtaaaggacctagcagccagtttgaatgggctttcactggccaaaatgggaacagctggagcatcaaaaagaataatgacagtcatggcttataacacatcgaatattaaaaaaaatccatacgtttgtagtgataattggagaaggggagtagaggcacgagatcagaggataaaatagggaaggctcccttttttttatagaacactagctaataagtttagaaaatctttgttttgtaacctccaggtatactcatcaatagatgcaaaaataagttggtgaaagattattgtaggatattctcaaagtatcaccccagcggattactgattctaaagggacagtaccttcacagtggagtaggcaggcagccagcatttcaaccaagtgatccaacctaacttcaccaatagtggaacgagctgatgttacatgacttctgaggtgattcacctaagaggtgcacatcacatatgtaatattcatgccaaacttgtttaactgaatctaataataaggaaacagaaaaccaaaatgtgggacattctgcaaaacaattggcctgaatccttcaataaattcaatgttatttttaaaaaagatgagaatttgttgcagataagagactaaagagacataacattaaatgtaatgagtgaacctggattagatggtggcaaaaaaaattatataaaagatagagcacatggacgcaggaaggggaacgtcacactctgggggactattgtgggatggggggaggggggagggatagcattaggagatatacctaatgctaaatgacgaattaatgggtgcagcgcaccagcatggcacatgtatacatatgtaactaacctgcacattgtgcacatgtaccctaaaacttaaagtataataataataaaataaaataaaagatatactgggatgactatacaattttgtatatgaactatatattacatattattgaataaatgttaattttcttgtgatgatggtactatggttatgtagttgagtggctctttcagcttctgtgtagctttgaacattctccacagacaaagtttgggagtaaaagtcctaagcagagagtggaagtggtcaggcttcagctgctacacccctgctgatgagcaggattgagtggggccatctgtcactagggagtgtccccttctgtcctcactgctcctctccctgcctgtcccttttagagctaatggcttggtccaagacatgggtctgggctgtgtccaggtgctcagagctgcttagaacactttttgaagaagtggcctaagctggagtgagggacaggacaagggcctggtggcagtacctgttggtacagacggtagaggaattggggaatatagtcttttggagttagacccaagcttcatgccttgggagatgttcgtgaaaggtttctgagtgccaaaactggggtggtaggggctggaggaccctggagggtctgtaaccactgaagaagaatcaagtaatcccaaggaaggagcctcgtgtgtttagctgtgtcaactggagtcaacaaattgtgtgtcagtttgcctatttggcttgaatagtgcttttcaaacttgtcaataggaccctcttttttaaaaaaaaatcagaatgttttactgagccctcatatgcaaaccaagcaaaagtggtactaacgggggcccaagtcctcccagtctccctttacccctcagcccccagacaccctcctgtggttgcttgagaactccaaggccctgaggagcacaggacaggcactgctgggatagcatatgcaccaggatacttcttacaccaggtggaccaggcgtgcagtctaagtgcctatgtgtggcacattggtgactcactgcagaagaactggggtagaggggaggagggtggggctgttgtttccctagggatgaagtccttgggtggtggcagcccttgaagtttctaggggtaactgggaggctgctctgagtgatttcgtcaccatgtcctggccaggttcctggcatgagtcactgagggccagggccatgcactgtcggggagactctgtaggggccacttccttggatgtggtttcaacatggcttcccctccttggaacccatggaattgcaagaggccaaaactctggatgaccctccctggtcacgtaactttggttcctttgaaggggcttcttctgtgtgcaaaggccaggggattggagctggctcagatatgtgagtagaaagttgtaaatggcccgattgacttctgttgcagtgagacttctcaaggatttccagggccctgttagagccgcacatgatgagggcagcctgggccttccttagtctttcacactgttctgggaggtgtttaatattgcggggatgccacgatgccatgggacagctggccatgcatagaggctgctgccagttgggccattcttccgtttgctgttctccagttattggagaaaggaattgctcccaatgtgggtgtgttgtggatggcgtattttgcccatttccacaaaggtgtgtttggaggctgctggatgcaattacaacagagtcagcaccttcttatggagtcaagggtttgtggggtgtatttggaggtttcctatccctaaggcagatgccctggctgcctgttccttttagtccttcaggagacatcaactgccccgacactgctttatgctgaccacagatgagctcccaaatgcacagcttcctcatctttaaagtagacacaacaatgcctggtttcaaattgtaaataagctaatatatgcaaaatgcccaccacagtgtccggtttataatatggattaaagaggtaatgactaaacactgaatctcttccctttgaatgccaaagccagtggccctgggtctttgtttttacccccttagaccttctggagttattctcctgcctgaagctgcctgtctttattttccaaacacatagcatctcttccttcctcataacccttgctgaggccctagccatgcttggagtcccttcactgccatgtctcagtttatctaagtcttccctgtccttgaaggctcagctaaaggcccacttcctttctgataacttcccagacttctatgtgctggggtggtcactcttcccttaacctacaggacacccaggctgcccctttcacttggcacctagccacgtgctgctaagaactccacataggtatagatatatatttttgcaaaatttgtatataacatgtatgtaggcacatacacacacacagagaaatgaggttgagtctttttattctctcttcccaaagcctaggtggctgccttgcacatagtaggtgcttaatgaatgcttattgattatgatgattgagttttatattagcttcctagggctgccacagcaaagcatgaaaaacgagatggcttcaataaccgaaagtattctgtcacggttctggagttcatatgtctgggatcaaggtgctggtggtgcctcctctgaaggctccagggggagaatttttctttgccgcttccagctgctggtagctcttggtaatccttgccttgtggcagcatcgctctgattttcacatggcattttcatgtgtctgtgtccagattttcccctttttatagggacaccaatagggcccagtctgatggctttctcttaacttgacctgctctccatataattcctaggtactggaggttaggactccagcatatctttttgggggacactcttcaacccataacaggttctttgaggaaatcaccttgaattatagtaacaactcagatgaattagctgtgggcttttatttgaatattgaacattaaaaatcattaataatatgggagggaggatgctgattagtttgtgggcacaaattacatgttgagaaattgataaatgtagaatataatgtttataaacaggctgaacattcaaattaaaattggtaatagttttgaaattaagtacctgttgttttcaaagaactctctgaatttatgtatccatattcttatccatagtcatgtgcaacagattcctatgtgtatatgcagggacacacacacacagacagaacccacaccagctattgcagacttagcatattgaatcagggcctcactgcacagttgaattttagggcatctgatctgagttgattctgcgtctttatgatggtaaagtcctttgcaaatagataaaatagcttgaggcagataccgttttaaatagctattaacatcccagctttggaggtgtccttcagtgacctgttgtttttaaagaagctgttttctctctagatctttgagaatgctgagtgagagagagagcagatgcgtgggtatggatgtagagttgggaactttcataacccaataaaatgttgaaaaggaggaagtccttgccagtaggttttatagtcctctttcctttaaaagccttggatgaataagcctgctgagttctcgtccttggcgtgactgtttatacaacctcgcgggctgttgccaagtgagcgagtgtgctgccatgattcagagcttcaggtgggggccgggctgccctttgtgacagcacaccagggactctgcgtgcccctcagagataacagcccctggaggatggggagagacctagagtttgagtcccggcttcctcatgaacccctgtggtggttgggccagtcaggtcatctctaggggtctttgctgcttcttctagcaaatagaaatgttagtctagagccagtgtttttccaaacattcctttattcacgttgataaatgtggaagttctattggtaaagcagtcaaggtgcagcgggtggagctgaaataagatcagggctatgttggctgcctccatcaggcccccaactcttcaccctacaaccttgtcagacacggaggaggagctgggaatagtgtctgaaaacccactggactatacaactcttttccatttttctaaccttctgagactttgtgattcactacccatgaagagaaaccaaggccactttgggggtgaatatttcgctgtcagagccactttgacaactgtaatgagaacagcaaaaagaccaagaagaaggtggacggacagacagactcattcagatagacatgtagagttgagtaggaacccatatactcaaaaatgtaaagaaaccacaccaccaatactagaaactcccagtatctactagtatgctattagcacactaggtgttttgtgtgttttattctgtgtattctttagactgcccactgaaattggtggtatgatccccattttagtgttaaggaccctgaagctctttaaagtacagaaaataactttcttaggggcacacagctagtagatagtggatttgcaattccaactcaggtctgtgacgggccatgttgccatgggaacattgacttgcgtgccttctcctatcagagaaactctgtttaggatatttacattttatcagtcaaggttaccgaaggtgtgtactatacccctgggttccagaaaagcagttcctgatttttttttctcccgtgtattcttcccttttccgcgggggttattaggcctaagcaactattgtctgcgttgaagctgtgtactagctgcacactagtctgcatggaagctgtgcactagcggtacgctagcactcctatcaggctgctatcattacaaatgccactctctttgggacttctgcttggctagaagctttccttttccttctcatcttaagctttgaaaatgatcttttctcctgagtttacttaggaaatgggcactattcagtctgtgagactgtcagaaataactaaattagttttattttttagaaacagggtctcactatgtcatccaggctggaaagcagtggctattcccaggtgcaatcatagcacacgattgccttgaacacctgggctcaagtattcctcctgtctcagcctctcaagtagctgggactacaggcatacaccactgcgcctggccaagtattttgataagccagaggtttcagtttttctgagaatatttatttcccaggctgtggaaaggccctttgggctcagaggtaatgttcatttttgtccaagaaagcaaaacagtgttaagtatgagtaatgacctgggccaaataatttgctgagatagatacacaggttgtacaagccagagcacattcccgaagtgccagcctctgcctgcaagatgggcagggaacccagtggctctgtgctcagcagtcccaggttagctgctgccctctggctggagaaaagaggtctgaagtaagaagttttggaaataacttggcttccagtctggaagtcacacgagtcacattatggcccttctcaaccatattggcagccaggatgtgtgaccagctgcccctcctggctggtggggcgggggactggctgtgttagtctgctattgtcagtttgatgcatgttgagctgcatttctgctcttatttcccctaagaatgctgattgaccaagggattttctttttttgcacagattaatcctcagtgtcaaggatgactgtatactccaaatattccatctttctttttcccttcaaaatgtatttatggagcatctatttatgctgggtaccagagatagagcagtgaataaggcagatgttgtccctggctttttggagcttgttgcattgtaggatcctatcttctcatttaagatttggacaatatcattggccttgttaacgcagactcttcaatggccagtaaatcccttaggagaggaatttaggctgagttagttttctgtagctgctctttctttctaaggcactggctgccagatgtatctttagggaggtcagccatagtatggggcctgtaggtagaatttatgctgtgagtactcacaggaaacagcttaatccagagattctgcgtatgtgttgggagtatggaatgccctttcagttaattttccttctttcctactttctttttattctacactttaattaagccttttattttctttttttttccgagacggagtctcgctctgtcgcccaggctggagtgcaatggtgcgatctcggctcactgcaagctccacctcccgggttcacaccattctcctgcctcagcctcccaagtagctgggactacaggcgcctgccaccacgcctggctaatttttttgtatttttattagagatggggtttcaccgtgttagccaggatggtctccatctcctgaccttgtgatccacctgcctcggcctcccaaagtgctgggattacaggcatgagccaccattcctggccaggccttttattttcaagcaaattctgtctagtattgtttcatgcccaggaggcttttaatagagtacattttttaaaatttgtttttttagtaccaagtagcattataaagaggcttttgatttttaatttaaatttaatttaatttaattttcttgagatagggtctttctctgtcgcccaggctggagtatagtagtatgatcacagcttactgtagcctcaacctcctgggctcaagcaatcttcccaccttagcctcccaagaagctgggactacaggcacacaccaccacatcaagctaatttttgcattttttgcagagatggatttttaccatgttgcccaggctggtctcaaatgcttggactcaagcaatctgcctgccttggcctcccaaagtgctgggattataagcatgagacaccgtgcctggccataaggaggttttaaaaaacttaattttggagagtttcaaacatacaaaatgagactggatcatgtaatgagtcattgatcctctctccagcaccagcaacctcaatacatggccaatcctgcctcatctacatccacgctgtataaggaaataaatatacatcatctgtatctcagcatgtttctctaaaagagactgtttcttaatatcatcataatgctcttctgcctaaaaatcaatacttttcttattgggaggtattttaaaggatacaagaggagagaaatttagccacaaacatcttgctcaacatatcagcttttttctttttttccccgtgttcagtttttgaccaaaagcatactgatattttataaaaatgatagccatctatgctcctagcagcttttctgggtatacatgttgtgaccggggtaaacattaactgtctgttcctccatctaagaagaataacaggtattcacttcatttggaccatatttatgtaccctgagtaattcccagacctctcccaacttctaaagttccctattcattcagcaagtatttattgagagactcattgcacgtcagtcactgttagatctgggaattacggtggaaaagaagacaaagtaggccctggacttgctgcaatttacagttgatagggaagcagggcttccccacacaaggatactgacatacaccaacagtcgctgggctgcagctgtggtgagtgtcgtggggaagtgctgtgagagtgaaccgagaagacctcaggggtctgaagggtcaggaaaggcgttcttgattcttgaggaagtgacatttcagcccagcagtgcagatcgagggaacagcatgtgtgactaccttgaaacaagaaggaggctggctcctaaaggaacagaagggaggcagtgaggcaggtgtggggttggggatgggcaggggaagtggaaagagccccccatcctgggcctgcctcttccaaatggccctgggacctgagagcaggctcttgggttcctacggctggagaccctgggatgctacatggagacgtgagttccagttgttctcctgactgtagcattgtagtgaaaaaagaactccaatttggaaagacataggcaggcacttgcaggctgttaccctggaagaagagaagtcatactatttacacagtagggtcattgtgaggattaaagaaaatatatattttattatatattatatgtaataaaatcacctgacaacaaatttcttccccctcctctttcttcagtaactttcttcttcacttttcctgtcagggaccatcagctccttgggctgcctcaggagtcctctcccctggtgtggctggtgctgatggccctgctccccagcgggtagagtcctggggccgtgcccttcctgggggcgttttatttagaccctgacatttacacaaatgttcaattcaaacataatgcttttttctttttgccaaaaaacattcaaagtctacaaaagaacataaaggaaaaagtgaaatctcattttcctgaggaaactgtcgttagagagctggattgcatccttctagatgttttacatacacaaacacacagtcttcaaacaaaaaatgaaaatttgaaatttatgatttttcactcagtgtatcttgatctctttctgtgtgtacaactttgagacctgggccactcgggagtgttccacagacttcattgttcctggcattgcttgtgttttccctgctccgtggcggcttcatctccctgcttgggccaggggcaggatcctctgtgtccggccacctgagttttcctgcaagccagtccacctctgaaagcctttgctttgcagaaatgcatttcaccaaagccttgtgttgtcattggcttgttttttaggaactgggtggagtctgtgactgaaagatcttgcttttgtttcctggtatttggggagtttcattagagcttttcctcttcctggttatatgtccagtaaattggggataagttaatgccagctcttgactctgctgcaagccatttaacagctcagttacccaaacttaagcacaaatgtaaggatagcatcagtgcctttggggcccagctgtaagggactcagggggaagcatttaccagaaacaagtacaaggaatcacagcttcttgcatcccatctcttcccaagtgtgggaagaagggcaagaagcaatggttgtagtattttcttactttttaaaaagattacattgaaacgaagcaaaacaaaacaaaaaacaagcaatatagaaaggtataaagaacaaggcaaaagtcaccctgatctctagcgcccctaccccatccatggttccttccttagagacctgtaagtttaatcatcatcacatagttttctagacctttctttgattttgcaaactttgaatgaatgggatcataaagtacttaaagtacataaagaacttactgttctgccacaatgaatgattttcaaatgcaaattaaagttttgtgtgttaaaaaatgctttgtgggccaggcaaggtggctcatgcttgtaatcccagcactttgggaggccaaagcaggcagatcacttgaggtcaggaatttgagaccagatggtgaaaccttgtctgtactaaaaatacaaaaattggctgggcgcagtggctcacgcctgtgatcccagcactttggggggccgaggtgggcggatcacaaggtcaagagctcgagaccatcctggccaacatgatgaaaccccgtctctactgaaaatacaaaaattagttgggcgtggtggcgcgcttctagtcccagctactcaggaggctgaggtaggagaattggttgaacccaggaggcggaggttgcagtgagccaagattgcgccgctgctctccaacctggcgagagagtgagactctgtctcaaaaacaaacaaacaaaatacaaaaatgagcccatgtggtggtatacacttgtaattccagctgacttggaagactgaggcaggagaatcacttgaaccagggaggtggaggttgcagtgagccacgatcacgccactacactgcagcctgggtgacagagtgagactccatctaaaaaaaaaagtgctttttttttttttttttttttttttgtgaatacatggcaagaatctctgtgtaaaggcagttgaaaagttagcaggacagcagaattacctttatggaatttgggtttctgtgctgtgggattgtcgaggtacctgggtcagccctagggaaaactgagagaaggtcagtttgtctgaagtctcagtccttgatcttggattttttcttacttctgtcccttccatgttgtggaggcacctactctgtccccctgcatctaaacatagcctgcagtatggggaggtgcttaatgtcagacagaatcacagagccaggcttgaatgtaggtgtgtgtccataagcaagttgcctaacgtctctgaacttcagttttctcagctatgaagtggaaaggacagaaaggacaattgctgtgtcatagagtggttgtgaacattaaatgtgattaggaatatttctagcctatagtaggttttcaacaaatcttaatttccccctttcctgcttgttaagccttcattctataaaggcgtgttaaggcttggacatgttactgtttctcaagggtatttgcatttcaacaatgaccaaaactttaactgaaggaattaagaaccagccaacaggactgggaggatccttttgggctgaagtcacaccacctcttcctggcttttcagaaatatttcatgaatggtcacaacaggttatgtactaacactacccccttttcttagaacttggccccaggaccagccctaccctcagaggacagtttggctgctagatgactgccagcctcaaccttgtgcattgtatttagtgatgaggttgaagtcatatggagaagctgggataaggggaaagacagcattattaagagcatgaggtttcaaatgcttgctcttcttactaggacaacgcaagtccgtctggtatctttgtgggaattactcttaggtgagtggacaggcccttatatacattagcaaacggtgctcttcctccggggtaaaagcagcccaagcctatgccaaatcaccttggtgaacagagactagatgggatttttgctccctccatctccactgccaggcaatgagtgctgggcacaatttgcataatcatacacagtgggcccgttattacaactgtgcatgaggcctaaagagtcattattctttttttcttttcctactttcttttagcttcttgacctgagcaatggagaacctaccaggaaacttcctcagggtgttgtttatggtgtggtgcgaagatcagatcaaaatcagcagaaagaaatggtggtgtatgggtggtccaccagtcagctgaaagaagagatgaactacatcaaagatgtgagccatttaagagtttttgccccccacctgtattctttttgtagcatgcaagagaatggagttggaagcattgaagtgaatgtaataaggcattttgaaagaattcttagtgttatcattttggctggaaatgtttctgtgtatcttcatggtaatgttaaagtacagatgtaaatctgcaaggaaggaaaggttgagcttctgctggatggatgttactaggtaagtatactcaggagagcagatggcttcctccttccgtgtagggtttggaggctcttgagtggtttttctttattgcacttaccagtcccacattcatccctggcaagaggaataggaagactgtgggtgattcagatcaatcagttgggttgaaacaaatgctaggaagtcaaccacaatagactttgtccaaccaagccaatcaatgccatttccttgtatttagtagtttatttcctatcttttaagttacatgttcttttgagaaaatttgggaaatataaacatgtatgaagaagaaaataaaatcactcataatctcactattcatccagagcaattgttaacattttggagtattttcttcttctctctctctccatttcttttcattccatcctgtgttcccctagattgactgattcccctcttgaccaaaccacccagcttatatggaagaggagatggcctgctctgacactgatgggctcacattacagaccagtggcttagaaagtgcttgtaagaggcagtgtaggggcagggagtcaacctaggcctgtgagctcacagaccttgcttcgagctccagctctgtgtctggcccagcaagtcacttttgctctgtgcaggcttcagtcctcatgttgagattgtgggggttggctgggctttgatacctaaggttaaaaacacagctttgtgagccccattttattttgtgggttttcagataagatgcaaactcatgatgtcttcgcttttgtgtgagtttttaaaaggaacatttcttgttgaatttaaaaaataataaatgcttagcagaaaatatgaggaaaagccagcaaaattagcacgcatatacataatgtatatgacagccaccaaccttaaactcctagttatcccacctttcaaacataattttaaaaatttattttattgtatattttcgagacagcgtctcactctgtcatccaggctggagtgcagtggcacaatcacagctcactgtggcgacacaatcacagcttattgcagcttctacttccccaccctcaagtgatcctcctgcctcagcttcccaagcagctgggactgcaggtgcgcaccgctacacccagataattttttgtagagacccagactggtctcaaactcctggacttaagtgaacctcccacctcagtttcccaaagttctgggattacaggtgtaaatcactgtgcccggcctccagacataatttttaaccattcagaatattcaattcctgaatttcctgttaagaatagctcagacattttaattttcttgtatttttttctcaaggaaatacatagaccttcctcacttaaatgctccggaggtatggctcctcccttagtaaccttctaaacagagtccagagtcccacattgcccaagacaaaggcaggaggagatgttggctaatcctgagctgtggatgacatgtaccaaagacatgtgccaaagacctggaattaccaccctccactgtgatccgcaacttaaaactaactttcaggtccctcctgccataggtggcttcagttccatccctggcctggtcattgcagtatttgcctttgggagggacatgcagctcaagattccacccactcaccactgggagcagcacaagagccagctcagggccacacatgaaagccgttctgcctgcctagaatgaaaagttgtacctttaacctcattttcccaaaatgtttgtacttcatggcaagaaagtagactctatttttagaattcatgtggggaagtctgggggtcttgactctcccttcccccaaatctccaccaatatccagtaacccctaataaacatgctgtctattttaaaacaatgtgcttcaaaattaagccttccaatactatgtcctaaacacttacattctaaccaaactgctatctttaggcccttcctaaaacagaaattctggagtgtgctggagaaaactcccttgagacttcctgccctatttgagggttcctgagtactttccccatcctagggataccagaagaagggaggagacagggactgtttgtaaggtcttttgttgtgttttgaaagtttttaaggtcctgctagccctctgaaagtagtactgtagagaaacttgaacagcgtttgtgtaaacaagtgtttttgggatcacttgaacttttgttatatttactgccttgcgtgttattggtgattactgaggaactgactttcaaatttatgggctccccagggttcatattttacttccttccattccagatatttgattgctctttggcagtcagggccgatagagggaaaattagaggttgctttttggtttctttggtcctcttagccatgagtctgttaaaacacattctacttgtaaaaacatgtgatgggaaaagggcaaaactttgcccaactgtcatttgagggtgataggtgaatttcaacaaaccattttttcttcagagtttatttggctaattaatatttattatgatagttacatgtaattatatataattttatgtaattaatatatattagcatatatttgatatattctatattaatatatgcctatatattttattatgtatataaaatatatacataataaaattatatatatataaattatttggataattcctaactagtttctaactagttgttgggggtgaccttctcccttaatttcctgtcttgttcttaagtttatttttatgtggggtccttctttctttttcttttttttttttttttgttttttgagatggagtcttgctctgtcacccaggctggagtgcagtggcatgatctcggctcactgcaagctccgcctgccggattcacgtaattcttctgcctcagcctcccgagtagctgggactacaggtgcccaccaccacaccccccaactaatttttgtatttttagtagagacggggtttcaccatgtcagccagggtggtctcgatctcctgaccttgtgatccgcctgcctcggcctcccaaagtgctgggattacaggcttgagccaccgcacctggccggggtccttctttctttagagtttcttaaaagttttagaaatcttgtatgaaaatgttatggcttgatctctaactagtatctttgtgggctacaggtgagagccactttggaaaaggtgagaaagcgaatgtatggagactatgatgagatgagacagaagattcgacagctcacccaggaactatcagtaagtcattatctcagttgcttggagatagggaggcatggcaggctcagagtggtccctcagtggctagtgcctaaagatattagagtatctagtgttctttatcaatagaattacattttaaataaactgagaaaattttatcacagaatgaaatttattacctaaagggaaatttttatggtaagaataatcgtattcatattcaaagcattctcaccaaagtcaggagcaaaacaaggaagccagctatcactattattatttaacattgttcttcacatactggccaaacaagagaaataaacatataggtttaaacatggcataggtagatgtaaaactatcactgtttacaaactatatgattgtatacctggaaagctcaagtgaacatgaaatgatgaaagaaaaactactacaaacaagtaaagaatttgttatttgtagcagggtataaaattttatacacacacacacagaggatataaaattaatatataatatacaaagaggtttcaatatacaaaaaattcccaaaatatcatcaacagaaaaatactacatacctaggagtcaactataataagtggaaagaaacaccatgtgcttagaaaggaagattcagcatcataagatccacattactgtaccattttaatatgacccaataaaaagaccaacaggttttgttttttataagtggagtaggtgattctaaggtttatatagaaaataaataaaaagattgggaaaataatgggaaaaaagagcaacgagagggagtagccttattaaatgttaaaagaaagtgaaaaagcctcagagattgaaacagtatcatagtggcacataaatagacaaacatcaataaaaagtactccagaaatgtacccctgtatatgataaatgtagcatctcaaaaaaggaaggaaaatggactagtcaatatgtgctattgggaaaacttatgtgctgttggaagtcttatacctggctaaattcctaaagtatcaaagatttaaatgtgaaaaataaaacccaaaagtgccagaagaaaaatatgtgtgaattcatttatacccttgaggtaagggaatgccttttcttattatgatataaaatcccaaaaccatgaaaagaaaggctgataactttgacaactttgaaatgagaaactcctgctggtaaaaatgtcaaagtcaaatgaccgggaaaaattatttgtccttcgtatcacacataataggctcattttctgaatattgaaagatcccccacgaatcaagaagaaaaaagctacaactcataaaaataggtgaaagatttgtaacaggtaatgtatactaaaggaaagatggagagagctcttttgtgtatgacaggatgctctgcctcacctcatcgtaagataaatgcgggttaaaaccatcccatgatataatttttatctattagacccgccaaagtgcaagagtgggtcaggacattgttcacaggcctgtgggcaaagaagagggttgctgatgaaaatgcaatttgctattactcttacagagaacaattcagcattatcgatcaaaattacagatgtttagatcctttgacccagcaattctattcctagcatttattctacaggtagactctcacatatgaggaaagacataaggatagatttatttattgtagcattgtttgtaatagtaaaacaattggaaacctaaatgtctatcaagtagaggaaagtggacaggcacggtggctcacgcttatgatcacagcattttgggaggccgaggcaggtggatcatttgaggtcaggagttcgagaccagcctggccaatgtggtgaaaccctgtctctactaaaaatacaaaaattagccgggcatggtggtgcaggcctgtaatcctagctactccgttggctgaggcaggagaatcacttgagcctgggaggtggaggttgcagtgagccaagactgtgccactgcactccagtctgggtgacagagtgagaccctgtttcaaaaaaaaaaaataagggaaagtaagataaacgatgtatctctacaatagaatatatgcagttgtaaattaaaaaaaaaaaaaagaaaaagcaagtaatcccttgaaggggagatacagaaagatgtagacggtgaaaaaaagcaagatgcaagaaaatatgtaggaaaaaattgctaccatttgtatagaacaggaagagaagataaacatatcaggattgttctgtgtgtgcacaaaaagttactaaaaggttaatccagaaagtaactaacaactgtttctaattgggaggcagggtggtaactgagcagggtggtaattttttataaaaatataaaagtaactttatacttttgaaatgtttgcaccatgtgagtgtattacctactgaaaaatttaagaaaaataaccttcttctagtttagccaagctaatgcttgtagacatttaaaaaaatttattattaatattcccaaagataaaagtccctgtctatgtgacgtaccttccataagagttaatatctgtgggaaagaagggcagttacaacagtcatgcatcagagttcaatttatggctgggctgtgagattaagtgcttaagtaacacctagtaccttgattataggagtggggctacgtaaatatatctccctaccccatttcttgattataggagtggggctatgtaaatttatctacctagccccttccttgattataggaatggggctgtataaacatatctacccagcccattcccactggcatgtgggaggacatttgtgaaattctcacctgcttatggaaagtcattctgccatgactgtcagacaccaatgactgtcatcaaagccaaagaattggatttgcaatagatgcataaacaagactctgctcctcgctttccatcaccatctcctacacaccctcattttctcatgctagaattgtcccagaaaccctgtctctctgcctactggtctcctccttctccaagtcatcctacctactgcagccagattaagattgctaaattattgctattgaaacacactgctgaacacaaagctgccacatgctcctgggcctggcttgctgcttcaattctgtctccactccccagagtgcacctcctgctctgctgtgccggggctgctttctgctgctcccagaggccacatggggggccttccaccctcagtcctaactgtatctagcctcttaccaatatctaggtcaagaatggcttctgactcagacatgttaaacacacacacccaacaaagacagcagcaacaacagcagcaacaaaacaactctttttttttttttttaaatgagacggagtttcgctgttgtcacccaggctggagtgcaatggcgccatctcagctcactgcaaccttggctcactgcaacctcagcctccggggttcaagcgattcgcctgcctcagccttccacgaagctgggattacaagcgtgcgtcaccatgcctggctaatttttgtatttttagtagagatggagtttcaccacgttggccaggctggtctcgaactcttgacctcaggtgatccgaccgcctcggcctcccacagtgctgggattacaaaaacactcttgagaattgagtgagaccaaagcatattctctccatggtgactacaaagaacaaggtggctgcagaagttatttcaactgggttctagttctaggagcgccacttctgagctgtttgacagtgagcaaatcacataacttctctgattgttttcttccttacaaaggacaacattctgactcctgcacagtgttgttgagagggctaaatgagggtctgtgagtaaacactatccaaaggaaggtgattcttgcccttctctctggatcatgcagatgttgacttttaatttaaagctttactttagatattgttgaagtagatgtggcttctaacagaagaaagttccagcctaactgaagattgtcgtgaacgtgtagggattgattttgtgtgactgtctcctcgatctgtccaggtttcccatgctcagcaggagtatctggagaatcacatccaaacccagtcgtctgccctggatcgttttaatgccatgaactcagccttggcatcagattccattggcctgcaagtactcatctgcttactgctatgacagggcaacccagcttaatcaagagtggggactgtgcctttgcagaaaaataagtcacagaacatccttagctcatgattcagaattctttaagcagaaccactgtgaagactgtgcccagaagacagtgtaggaaactgaaggaagcatttccaagctgagactctaaggctttgtttttgctctctgaaaaggaaatttagaccccgagtttagtgtgagagatgttgcttgcttcaccagatacccgagtggtcctcagcatcagtgcctaaccccacacgtcagccctcttcctccagtcccagtgccacaggaagtgccacctaatcacagaataacacagacttcactaaggacaatctgtactccttcatggcaagcaatataaaaaaggcctgtaaacacttttttataattagaaattattttgtatcagaaagaatcatggatattccacgtcttgtagtagcagacagggaaacagaaagacccggtatcttatatttgtgaaaatgcatgttgttatctcactttgaggcattgttttcttggttgatttggtttacaggagctaacccttcaagtgcttcccattcttactcttacaagtcccctaacatgcaaattaatttgaaaatgttcaaagcaaagcattgtatgtatttgaaatagcttcccttggtcttcatttccaaatgtatgaacaacagtttttacctctcctccaaatttatttggctcttatctttttatcctcctctcaaaagttccaaaacctatttcaaatcctttctggttctatataagtaattttagataaataaattttcatgttgggattctccacttcccctaattctctgataacagttggtatggcagcagtgacaacagcagggctcggccactgtcctggagtgggtctgggtggcctcgtgtttggggtcatctgcgatgcccatttctggtggggcttctgagtcccacccttttcctggctctcttgagtgtatgccagctttcccctggcctcaggccaagccccactgggtctggtttgctcagcagcctttgttttcccttcctcctgtggtcgggggggcttgccaaggctccctttcctcccctttcggacgctgtctcattcccagcccaccagcaagggctttatctcacctgagttcagacttagtcggtatttgtactacatctctggtttttcttcccagaaagaaaaatatatttgccagtattttctggcaattcttgtgctttgccatctggccaacactctggcatttactgcagaggtcagctgtttgagctgggccagctctgacccaggcaccttgactgattcctagttatcatgcaggctcttagtcctggacagccaaaggagccttatagctaaaaccgctgagagaaacagaaagagagagacaaagagagagggagagggagggggagggggagggggaggggaggggaagggggaggaggaggaggaggagaaggagaaggagaagccatctcacagcaggaaactcaacctggtagaggaagagggctgatgcacggtgttaggcactgatgctgaggaccactcgagtacctggtggaccgagtctgaagagagctggcttcttccttatgcaagaccccagcctcttccactggcccactctgtccactttcattattattgacagggagaccagacccttggtttgattccatagaatgtcagagctagaaagaactgagaggatctcagttttatgaatagacaaactgaggccgacagagagaaatgacatgagcaagatgcctacctagtgacagagccaggattagaaaaatcctggtctcttggaccagagtgtaggtttttgtgtggatacacgagtagaatctgtgaagccagtggggctgggggagtgggtggctggtctaggtggtttctaaagccccttgaagctcaaatgttctgtgactccatgcttccaaatagcttcagtattttctttagtatctaatcacctccttcagaaattctttttcttgattcaagtaggtttaggagtgaaaggcttatattgtccaaagtagaggctgaggaattgaggaagcttcagagactgatcatctagacaagagcacagaggtgttagaaacagtgcccaacaccagggttttcacatcttctaatgtgaaattgtagatgactggggacacagtagaagatgactttccaacggcacagattctgtggaggccatttatctctaaggagagttaaccaagtagaaaccaaagcagtaaatagcaccaccatttttttctttttcttttttattatttttttagagatggggtcttgctctgttgcgcaggctggagtgcagcagtgtgatatagttcactgcagccttgacctcctaggctcaagtgatcctcatgcctcagcctcctgggtagctggggctacaggtacacacaaccatgtctagctggtttttaaattttttttgtagttgcccaggctagtcttgaactccaggctcaggtgctcctcccacctcagcctcccaaagtgctgggattacagtcatgagccatcacgcatggccaacactattgatttaaacatccttgcttcagtgcggcctggagcaaaaattacttgtgcggcttggagcaaaaatcacttgtctgcattaccaaattctgttccttagtacttctttattactacccttctctgcctaagggaggaaggtgaaatgtttgcaggtatgtgagtattctcagtcacattgtcactatcctggcaggcagtctagaagcgcagaagggatagctcttttaagaaaaaagggaggccgggcgtggtggctcacgcctgtaatcccagcactttgggaggccgagtcaggtggatcacgaggtcaggagttcgagaccagcctggccaatacggtgaaaccccatctccactaaaaatacaaaaattagccaggcgtggtggcaggcgcctgtagtcccagctactcgggaggctgaggcaggagaatcgcttgaacctgggaggcagaggttgcagtgagccgagatcgtgccactgcactccagtctgggcgacagagtaaggctctgtctcaaaaacaaaaaaaaaaaaaaaaaaagaaaaagaataaaaagaggaatatctctattctataaagctcgtattttgttttctgatttcattgtggcaatttgggaaatacagaaaaaataaataagaaaatagatacccatagccctatcacatagtgaaaactatcattcagatttcctcctggtctttttccccccagtgcataaacatatatttgaaccaatgcttatacatatttttcaaaatgggattatactatacttactattttcaaaagctgttttttttcccatgtgaaatgatgtattataatacttttccttggaaggactccattttaatccatttccatccatcctaagcagtggcaagtggtgttggcagcagctatgggatggtatgggagaggttttcagtccctccaagctacaggggcagacctcttggccaccatgggagacccacagtccctcacagcacagggtcccagactggcagttgctgtagcctaggacagctaccccagtgcttaatgataaggggatgccccagcatgtggtgcagcccatgtgttttcacgccaccggatctggttttgtttttattttcatcctcacagaaaaccctcgtggatgtgactttggaaaacagcaacattaaggatcaaatcagaaatctgcagcagacgtatgaagcatccatggacaagctgagggaaaagcagaggcagttggaggtagcgcaagttgaaaaccagctgctaaaaatgaaggtggagtataaaagcctagatttattttctatgaacttttctcctctttacttctcccttttctcttcccatcttcaacctttccatttccttttctccattctcttcttcattggatttttttttttttttgagacagagtctcactctgtcacccaggctggagtgcagtggtacaatcatggctcactgcaacctccgcctcctgggttcaagcaattctcgtgcctcagcctcctgagtagctggaattacaggcacgtgccaccttgcccagtaatttttgtatttttagtagagaaggggtttcaccatgttggccaggctggtctcgaactcctgacctcaggtgatccgcctgccttggcctcccaaagtgctgggatgacaggcgtgagccaccgtgcttggcccagtttggggcttctccataaatgcccccattgggcatgcctttcttggcctccagtcccttcaagggctctttagacactcaccatggtgctgttgttatgtaactgagaagacgcttgggatgcccacagatctgggacgtcagaagccttggagatctcttccttcactgtttagattttctttgaggtcccaaggcctttctgtttggcttgacaataaagagctgaggggcacacaaatagctggtacttgggctgtaccccaagtacaatattctcaagaagaaaattggtgggtgactagggacactggggaatgtcccatttggccccctaggctgggagcattccttagctgaacttctaatgccctagaggcattagtgcccctcccaaatttaaactgtggatagacttcctacccggtgacaggagcagatccatgaatggctcctggagggcacttaataaattatatcttggatgaattcctttttatgtaagtctgtggtttgaaaattttgctcagcacagacttaggctatcttatgagtagcgtatccacatagtttattgctcaaagcagaatatgtgagggagtgaaaggtggtactattggtaatttagttagggagacaaactgggaagtgtgggccccttcacaggggtaggctgggtggggaagaggggctgccggtccaccgcccggtctctgtattgccgccctggggatctgctgccagttcacttggcctgccacagccatgggacagatcatctcctctgtatgttcacttctaatagggcagctcttcttttccgtgtaagagttactttctcagtaagagttacttggggggtgaaaaaagtttatgttgctaaaaaagcctgaaattactgatttaagtaatttttttcagcttaggggatttattcaatcattcagtccacaaatatttattgagtgtctactctatgtgtgtgtcctgttcagtcctgttggttccagaggtggcctgtcaccaggcatctggggacatcattaggctgcttggcaatctggctgcttccctggagtccaggcctttaactccagcccacagttgcctgttttagagactgatgcttgttttcatcctgacagtggagttaaaaaggtttctcctactcctcctattttactccccaaattgggaaaaaaaaaaaaagcttcaggaactcagggtatgttacatgacctggatgcagagtgaatgggcctccagggacagagcccttccagcaagctgtgcgtgcactgcaaatggagcacacagcacacagggtctctctcagctggtcataagctctgctcaggactttccactttggaacttcttggtgccaacacttacccagtgatgagaagggagaagtcaagggcgtcaagagagacttgtcacatcttggaaataacatcatgtaacctattgagtttgaagaatgcttcccttttccagagtttaggtatgcagcaaactcagctctctgcaataggcgataacctggaaggaggggatgagagcaaaccttctgcagcataaaatcaatggcgggaagtctgtgtgtgagaacgtggcctggcaaacaggaggcaccagccaccaccaacctaagccctgcccacctgcaactccactgactttttctcacctcctaagccaggcctgcttcagtactaggggtgccagcttagtgttccccatgctaggttggaatgtttccaaaagcaacatttaggaaagcacaagggtatggaaagggtgagtccagatttctcctttgagcttagctggtcttacctagaaactggcttggccaatgcaactgatgagattgcgtagagaaataagtttctaccttttgaaaaagtcactcatgtggagcatacctttgtcctgagaatgcccccaaaattcgtgtgaaatgccacttttatttttctgtggctctgctcacccctcttcctccctttccctgttaggtcttgctgtgtctctctgctgcagaacccagtggatgggctcactacctctgtgagtccccacatgaaatgtgcagtggaagctgccaattcctctgggccctgcaaaagctgtcgttctgaaatgagtctcgttgtaggtggaatcgtcccaagaagccaatgctgaggtgatgcgagagatgaccaagaagctgtacagccagtatgaggagaagctgcaggaagaacagaggaagcacagtgctgagaaggaggctcttttggtgtgtgtgttgtagctgccgatgtaaacttaccgggaattgttggttcattattgttggtgatgtatacgtagtagtgtttattcttagaggtgggtcagtagactcagccatgggtaagggatcaaggaattattcatctgctcattcactcccctcccctcttcccctctgcctttattcatccccgtctctactcagaatagccccttgtctctgtctctaaatacacacctttttctagctcatctgacaatttgccagcatctaagcaaaccctgggcttgcccgcagctgtgccctccctccctccatttggttctctctacctgaaatttcctccttccctatctttgatcttgcctaagctccctaaaagccttaaatgccactctctccatgcctggagtctcttccagtcatggagccagaaccattatctgtccttaggaagctcactcactctctctctgcttttactttggaattcttttatacctgccattagagtggggctgtgcgtctcacatcttggcttttccaggagattataagttcctgaaggcggggactccatgtctggctcatctgtgtccgtagaggcttaatacatgttctgatgattgactgggttttcttgttagtaatgagctgatgtattgcattatgggagaaggatctgggaattctgcattcaattccagatctggttctaattcccttacacttctggcaaatacagtgacattctgagcatctactcaatgttattaaacatttgtaggcctcttttacaccttttggatataaagacttaagggaaaaaagggaaaaaaatgtagtgaggcccattaaccagccacatgatgtatctttattcataggtgagaaccagaaccgtgaggttgagttcatgatctgtgagacactttcaggttccaaggtcatgttttaaagagaaatcgtgatctagcaaggcctgagctgattggatcccggtgagtagcctcggtactccatgcctgtacttaggagggtatatttcttttgcaggaagaaaccaatagttttctgaaagcgattgaagaagccaataaaaagatgcaagcagcagagatcagcctagaggagaaagaccagaggatcggggagctggacaggctgattgagcgcatggaaaaggtaggacacagcgttgggcctattgcccacttgcccaaacttttccctgtaggtccatctgagatacgagaggccctggatatggattcctctcacctccaaaatttgcaattaaaaaaaaaaagacaaagctataaaataaagtataaggaagtccaacaacgttctcatttttcccatgataactattttgatgcttttaaaaaatattacttgtgaaattctttagaaaaattaatattttagcagccttgctttgctggtgccccaggtgtgaacttagtttatccattgaattatcaagccctatttaggtgttacatcaacacagcagccctgttgtttctggggcatgtgtctcaagggttggcttttccttgacacgctggggacttgagagagtagggaggccccatttctctaggtgttgtaagcaggctggtgagtgtggtgggggaacctgaggaaggcgggagctcagctgggataatgaagcctgtctagtgaaagggaagaggccaggaattaagtaggaagtggaggaaggggaggaagtggtgggagaaaggaaagaggaaaagaaggaagagaaggaagagaaaggatgggtgacctttagcaggtgacggctgacttctggacccaggagttcagggccaagtctgtggctggtttctgggaatggctccctggctgcatatgagtttgcagagagcagtgacctgccaagaccctgacattattagcaccctgtgactcattcgggatgccaagaatctccaatctgatgatggaggcagaggtggggcagcaagagcaaggtcactgtcaggcttcatgtgatgctgagaagaggtcgccttagctaatggtgtttgcagcataagcccctgtactgtcccctcataaggcgaggtgtcgccactatgggaactgcatgaaattcagttctgtggagcttcagagctcactgggtgcttcgttttagctctttagctttttacttgggagagacttgggcaaactaaagagtcaattacaatctcccttctaccccctgggaaaacagaatcccatcttttattgaagagtaggtgattggcttagtcaggactaacattagtattgaccagagggggtggtggtgaagattgggcaacaagggagctttctagagcttgagtgagcttcctcccacattattgtcctcctacaacagcagaagatcccagttaactcagatgctctctctctgggcagcaggtttttctgcagcgtaaagaagcaaggtgagccggcagcatagcagggtggtctgggggagatgccgtcatacagagaaaccacaggtagtggtcatgaacataggctttagaatcagacagtctggggatttgaatcttgtgtctctttgtagttgtttgcacttacttggtttttcctaactcagtctccacttctgtaaaatgctgataatggtacttcttattcttagggcttttgtgagcaataaatgagaaaaatccacgccaagtgctaagcatggttcctcgtatatagtaagggttcgatcatttgtggctatgatttttactctgttacgaggttgcctaaatgtctaccctcagagtcaggttgtctttagcacgacccattttatgcttatcttcattgctgtcttgaggttctgaaagtttcttgtctttccccactgattttcacatggagccctcatgtgggatgaatgggtagagccaggaagctggtaaggccagccctccctgccagcatttaggaaacacaaaaccttccccaagtggtgttggcttcttctttagtgattggaaatgtattgtcctttctctaaatcttcctttccatttaggctagagaaatgctctatttattgaactaacattaggtaggccaatttacactgtttccttttcagggataaatctgtgagagcaggaatctggccaaatcgctgtctcacactacgtgaacggcatgtcctaggcagggctgtggcagtgtacgtatcctgctctcagttttggattttgctcaaggacaaaccatgtgcttttgaatggcttctctgccatatgccttagtttactgtttctcttgctgagcactgtatttcaaacacctttttttctgatcagtaaaaatcttttaaggagtgttctctaccagggacccttctggggaacagataatagtctatgccataatctgggcagtggtttcacaggtgtttacaaatgtaagaaataattgtgcagtgtacacttaagatttattgtacctcaatttaaaacaaattttaaaagtgtgctgtaagttagaccttgctctactttatgacagcctttttctttcttgttttttgttttttttttctttttggagggaggcattcacttgtgaaagcttttatcactgttatttcggggctaatgtaaaacttccaaccacataggggcaggaggaatgttctgctcaggccaggccataagaatgtgcatttgctgtagagatttaaaaacagtaacaaaaccccagtcaaagttgatctacctttgttattttaaatatttcagagataatatattcttcctgcttaaggtggactgcttccccacccctttggcctacctcttggtataccactgcttatagcttcagaagttgtggcagttaaattttcaaagatttgcttttaataatttggtagaaaagaggtttggaatctatgtagctagtaagagtttgctgggtggaatttccgaacataaagatgaggaacattagttcttagagaaggacctaaagtaaaataatctcccaattagtgagcgttatttgataaacttgcattttaaggaaatttgttacactaacatctgtaatgtatttttagcacaatttcggttatgacaggcaccatgtttttatgaacatttttcagctttgtccaaagaaatgattccagactcttttttgggcaaacttctaaatatacatatatatagcaaagtgtacaaagtgcacggcttagtgcgcgtatgtttcctattgctaccatagcaaatttccacaaggttagtggcttaaaacaacacaaatgtattatgttccattcctagaggtcagaagtgctaaaatccaggtgttggcagagctggattccttttggaagctctagaagggaatgcatttccctgccttctctaacttctggaggccacctgtactcctcaacttgtggccccctcctgcagcttcagaggcagtagcagagcatcttccaggctccttctctctgattctaaccctgctgcctcctcctccttagaagggcccaactggataacccaggatctccccattttaagatctttaacttaatcacatctgcagaattcctttctccatgtaagataacacataggattcaggaatcaggacatggacatctttggagggccatgaatctgaccacaacatatttttacaagtgaatacacctgtgtaaacaccacaagttagaatataggatattgccagaatcccagagcctcttttcttgatgattcagaaaataataaagaattttgcagtatcacaagccaccagtttaaagtattgataatcagtatttggggctataaattttcactgatcctgggctgatggaatactttggaaaatgaatcttgaatggttttatttaggatgttttgtctctgacccataaatatatctataaatacacaacaacagacttggcagttttgagccttgtttgggctttgctgagcaggtgtgtaaaacccagggggtgtcatatagacttggactccctagtgctagaattgctaaatagacattctctgtcaaacttgggatccattgattaaaatatcagtttctgtttgttttaggaacgtcatcaactgcaacttcaactcctagaacatgaaacagaaatgtctggggagttaactgattctgacaaggaaaggtaagacgtaatgcctttcgtcttgtaatggatttaggttgtggacacgctgtgtttttatgacctcatttgacccttacattttcatttgtgtggttgtaccttattacagacttaagcatacataacattgggctgagagtttccaatatggaacaagtttctttggaagcctccagccacatcctgcagatcatggctggttgttagtgtagtggaacacatcaaatactttcacaagtgcaaaagtttggtctattaatgttctccatggccttgaactccacaggatacaccttgttgatgagaaaactcatcagctgtgactaataccacttgctttggaaaccaatttaaaacatctttctttgtttccaaactttgcttagtaaaaccttgcattatcctctggcagtgagtatataaagccctacatgaaaaacacggaatagtacgctgtctgttctagaaatcaaaatgcagagaggccattcaggggtctctagtgaaggaaaacaaggttgagatgatttgagtgttttgggcaagtgacttaacctccctgagtcttgcttgtgccacatggaaattcatctttaaacgggggagacgggtatgacggtgataacagtgcccatctcactaggttactgttgttaagagaactattgggcttgctgcctgccaaatagtacgtgctgaaaaaatacccatttttccttcctcatttgcaatttcagagttttcaaagttacaggaggcttgctagtcattaacatagtgctgaggcagagatggggcacgggaactagaccaccagacctttcctccagtgcccagccccagcggccccagagaactgaagagtccaagcaatgttggagaataaattgtgctgttgtaaaacaaaagtatgaaatgttttgtgatgtggcttgctctgtttggatgtagagaaggtctttcaacttgtcccacatttgccaaaaataaaggatatgtagagcaactgtgattccagaccttttggtattctgccgttgatttcagatattttattgtgttgctggaccccttcttccccgtcctcccctccaagtaatttactggatgttccaatatgttaataaccccaaaacagagagcttctcagatctgtaaatggtgcaaaaaaattatctctcagcccctggaaaataatcatccttatatgggataaaacttgcaaatgggaacttgaaaaatagtcctgtgctcctctgttgtggtagtttgttagtaatcacactactttgtgtggtcatcacataaagtaagaagaatggatcttagagtttgatttcttgttcttggaagcatttttaaatgtttttaaatttacgtttatttttttaccaaaccttccccaaaagatacatgttttctatttttatttatttattttttttttttgtggagatgagggtctcagcatattgcccaggctggtctcaaactcctggcctcaagcagtcctcctgccttggcctcttgaagtgttgggattacaggcatgagccgccatgcttggcgctcttggcaatattctttaaagctgtgactgttgctactgctgttgctgctttggtttaggactcatttgcttttttctcctatttgtgttaggtatcagcagttggaggaggcatcagccagcctccgtgagcggatcagacacctagatgacatggtgcattgccagcagaagaaagtcaagcagatggtcgaggaggtaagcatctgcaaaaggtcacaggcctgggattgcttcctgtggtggggaagcatccccagaacaagtctgccttgcccctccatttcctgtggctcacaagccgaggtgctcaggccactgccatctaggcccagagtgggatttccccacatgtcccccatggactgatgacgatgatgcccctaaaagaggggtttcctcaggtcaaagggttacagttaagaaagctggaaagtgcagttcataagctcacccactgtgaaaggacagtgatagcctgagtgggtacccacagctcaggggacccaagggggtgatgggcagggtgaatttagcccaggtccctgcactgcctccacagccgtctgtctgtctctctctctctctctcagctaccattcttgtcctttatcgttttctgggtgtgtctttcattccctttccttgtctgtttctctcttttttctccctccttcctcgttctcttctcccactcctgcttcttcttccttttcctttgccaccatcctttctctcctaactgtctctgtaacaggaaaccaagctatacatttactgtttgggcatagtttactattctcttttttctaaatgagaaaacgggtaagttgaacatttctatttctctaagaggaacaaaatttgttttaacttgtgtcaatataatccgcctctcttgtggtgatgttccaaagaagaaagtccgtgctctgtaaagctaatcacatattattgtagttttcttcttgctcaattaaaaaatccgattgaaaaatctgatagaaaaagagcagttagtactaacagggttataagaattcccttgagtctaattctctaacctgcaaagaaaaaaaaaggtttcaatttaatcaaacatttggttggcagtggaaaaatgaaaacacattttccttatattaagtactactttaaaaagttatgttttattaatgaattattaaaattaaaagcatatctacttctaagaaataattcatgtacatgacagacaaatggaagattaaaatatatctattttattaatctctaagatattggggatattaatgttggggagttaaggtcagagaattgtgagtatgggaagggacatctttttttattgtgtgtaggataaacatacacattagataaaagtttgtccgcaaatgagaagtgcagttatactgtgttgaatcatgtacatcttatattggttcacacacaagtttctggggagcagtggaatagcagaggaggccacgcacgcatctttgcaatcgttttgtgcatccaggcaggagcactgcccataacagtaatgcggagggagatcctgccctatcgtcaacactaggtagatgtcaggagtgtattttccaaggaaaagcatcactttgccacagttagcatctcagtgagccttggccgtcggggcatagtttttctgcttttgaatttcacacgcacgaagtctggggcaagggcatcccttattttcccctatgcgagtctctaactgtgagcactacatttctcccacctcaccacaggggggtgtctgtgtcattcttgtatctaatcgttagagaactattgaacaaaacctcatactggttggcttctgattcacttaaacccttacctgtaagaggttaaggctgtaccagaatcagagacattgtttttttaaaagacattttcaaagaagtttagaattctctgtttcctaacttacttccagaatataacaaacctaccaatttgaagagagtgaaggagtacacatacgtacacacatatacatatgtgcatatgtatatgtgtatttatacatgtgtatacatatgtatatgtgtgtgtgtagggatgcatataaagatcactgtccatgctttgcttttttctacctgtgatttcatatcttccagataagcttctctaagctttgatgtggtctgtggtctggaaggcccagtcgttggaaagaaatcaccagctaaaatttaggatgccatcagagttagcaccccctaggggctggctgggtttccacagtgaatgtagaccaccaccaccaccagcaacaaaaagagagagagacactttttattcctaataatttttactgcctgatttagaaagtttgtgtttgcccagcatactacattaacttacataagaaaaaaaggatagcctagaatctcatttgctatagccatttatgtgaatattttttttaaaagttagaaacatggtcaaggggcatggacaggtgagcaccttcagaagagcaagaccaggttggaaaggagttgagaacctgagtaattcagggaactggggaagacatgcccaaggagagatgggagctgaattcacatcttagaaaacatgagggaatatgtctttgttttgtattgtgaagcaaggccaggccagaaccactgggtgacactttcaaagaggcaaattgcagctcttcattcacaacaaagaaaacatttctaatactggctgcactggtaaggcatttagctcttcatcatggttacgttctttacaaagtaagaagttgatttagaagttctctagtgttcctccacaaattctgtgttctgtaaccttaaagactgtgtggaggaagtctggtaacttcagttaagtgttcatcatataaagaattctctattgtttactatgctgtgcctgtttttgtgagctcagccttatcattatgttgcataatgagcaaaatcagcaaagtcgtaactaaatcacttcagatcacttggagcaaattttgaaaaatccggagtactgaattggtcacttgtgaaatgaatcttgaactctgactctagaagagaagtatgttttcatctgtgaactccggctccccaggcatataggcagcctttaagtgtagcggatgttaaggaccctttttcttccctcacatgggtctggaagctcgtcttcatcatagcctcactttcaccatggatggaagtctcgtctccatccattgttggtatcattttggccataatgtccatgaggaaacttagtttttttaaatgatgggcttcttttgtttagctcaaaatgtccaggtgtcactactgcgatccttgggaatccttaaatgttaagcaacatgtttcttctcaccttagtggagtatcattttatcatagtaataataaataataaaaagtaactggcccaggttttgtcatccttagctcattaatgacttgatttccatggtgggagacagtaggacttgtactatgtaggaagggctcatggtgggggtgagcccttttgaaatgaaggattagtatatatcttacggtgtcaaggtcattgagaaaagataatgcaaaacgttttctgtgaaatgtggaaccaagtccctctcactaggctagggctttctactgaattaagtctcctgtcatggatgtcagggggttgggtatctcccccatcactagttcttccagctgattctggctttgataaaaatgagagaacaaagccaaaaaagccccacgtgtgcctcttatagccggaaaatatagaaaaatgccgagggattggaaagaaaaagccctcaaggggaaattaattcattcatccattcagcagatacccaccagcacccgctccgtgctggggctgggtacacagtggggagtcaagcagacatgggccgtgctggcacggatcttacccactggtgtcacccgagttccagggtagtcttgcctttgggttttattatcctgttgaaaagctttgttgggattggtctttggtcctgaatcaagctgcattctttagattgccaggaaaggcactgggagagctgggaggagtgtaaaaagtaagagagcatcctgaggcccccacagtgcccctctgctcacacatctttgagtgtgacttcttcagtccacagagtcattcacaccctctttacctgctctcaccatggctctcctgctgccaaccaaagcagctctcctgccaaggggaaagtgatcttaaggaaaaaatcaactatttgccttccaagagggtgggtttacatttttgccaatgggcagggatattgtttagctgaataaacagtaatttcttaagaggttttttttttgttttttttttttttaagctatatcccagtgcagccattaggcatcctttcattttgtcatgtctttcttttgatttccctttgccatttgtgatataggaaatgtttcttccaacagggtctgaagggagtttcttttcatttgcagaggaggcattttctttagacttcttttgctgaaagcaattacactctaccccactttgctataattgagatgtttaataagtgcaaaggtgcaaggaattgattttctcattagtgcttctccacccaagctacacattggaatcacctggggagctttaagacatgcctgaacctggcagatgggatggaggcagactgagcattgggttttgtttcgttttaaaaactctgcaagtgattctaatatacagccaggattgagaatcgctgtcccggattctcagagcggtggcctgactctccttgctgggtttcatgttcatgcatttggccagcatccctcagaagctcctatgcctgaggtgggaagctgctggtgaactcaataggaagggctcaacagaaagcaagccagggagacagtcaccagggaccaggagcacagaagtgagaaagctggtccaagtctgtgactctctgggcactgtcaggggaccttcacttcttgccagcccctggtcctgggaggattctgtgacagctcactctttttttattttttattttgttttagagacaaagtcttgccctgttgctcaggctggagtgcagtggtgcaatcataccttcctgcagcctccaactcctgggctcaagtgatcctccccactcaacctcccaagtagatcgactataggcacgtgcacccatgcccagctaatttttgtattactgttattattattattattttttatagagacagggtttcactatgttgttcagctggtcttccaactcctggcctctagcaatcttcccatcttggcctctcagagtgttgggattacaggcgtgagccactacacctggcctgacagcctaatcttaatagctgtactggcctggtggtatccagataatacaaacttcccaaaggctatttagacccatctagagagatgttactaaggtgggaagaggtacgcttgttaaatagataatagaaacttaaagggacagaatccaatccacctaagtccttgaaagctggactaccactaagagagactaagggtgattctcatggatcctcttccaactgtgcatgtatgcacgtgtctgcctcgccctgctttaaattattcacttctgtctgtacagaagacgttacacttggccacatggtacccctttagaaagagaaggcaaaaacatcttggttaaataattatattagcaatgaccacttctcaaattcaaggcaaagcagaatattatttgtgattcctaaggaatgattttgaaagtatttaacggtcatctcttagattttttttaaagagtgatgctgtagtcataatgcagcagttccttgggggaaacaaactggatcagggagaataacagatgagtaagaactcttcagagagttgagactttgagtatctggctctctagccagttggccaaacaaggctttacattactagtccctaaatccacatgcatctgcagttagagacctttatgtgtctacaacaaaagatggcctagaaaaatagcaacaagtatggactttagcatcagacaaacctgcctttgaaaagttattagtttccttgtctataaaatagggttaataatagtatctacccaattttttgtaagagttaaatgagatgacatgtataaaatgcacagcatgttaattggatcataagaaataataaatattagtggctgttattattaccacctgtaaatgggttcggctgtgtatacctaaagttaagtgaactaaaagcaaaagtagctattgttgatttcctgagcaatgcacggggctgccctttatctttccctttgggagtcttgttggccacattcaatctttgggtatacttctctcttctcttttgtgctctgtgctgttttctagcttagccatcaatctcttcacaagaatatttatacaaaaagcgatttttaagatttaaatttgcttcatcgcaagtatctgccatttttacatggttcagtcatttgctggcacacaatttaattcaaaactgttgtgtggtgtgctgaaatgtgcaacacacgaaagtacattttactaaatgccctgtgtttagaggatttcaagtacttctcataattggtaattagccaaatgggggtaggggaaaggagccatagcaccaagcccacaaacctaatccactcaattgaactgtctccagatcatgtcgcacgagctcttctccagatttagtctccggctctttggaagatgataagttggtagcctgctctgggttggaagcgattcctttattgttcgtgattagaagaacacttgtacactctctgctgggaagaggtggtatttatctatgatgagccaatgaacaaaacaggaaggacatattatttaaaggaaaatttgaccatgtggggctcttgtttgtgaaaacacccacatactgtcaccctgacttgtacagcctcaaactgcagagtcaagagaactcacagatccacagagtatttttaggaacttgagtagacattgaagaaggaactgcaatgaaaaaggctactgaaaaaccattcagaaagatccaggtggaggcttggaagatgaatccttacttatggaaaagctgccaaagacatctgctaaggagatgggaagagagcttgaagaatgttagtgctctgggaaggaggtgctcccaccagatcacccccaagaaagtacaggagcagccaggtatccatgtggtttggttctatttgtatatgggaggtggccctgaaggtgtccttcctgaatggatatcaatactcatcttaggactcttctaagaggagtttagcttgcttctatcaccatcagcattttgcctgaattggttcaaccaacttcacgaaaaggagtgtatctgataaagagaaatctatctggctgaaatatgttgaactgaaacatccttcatgtatgttttatttttatagaggtctttcttgagattgctgcaggcattggtgttttatcagaacatggcagttttgctgagaactagcagtagtagctgcagtcatagcaatgggtggcatgagtctacataagctgggagatggggctcgtggagtgagtgcgttcagaggcccagtgtccctcagacgttggctagttctccactcctatcactccttcatggcaaagcaggcatgaagctgctttcttgctaatatttgcctttgctttcatttagatgcttctacccagcttaagcaaggagggaggggatgggaaagaagcagatgaatacttttccgcattagttattaaccattaatattgttcacctgtgcacggtgctgtgtttagacacagatccccagatacgatgctgggtattcagacttccactagggagacagaggcagatttgagaatctcatctggatgttagcttagtgttgttacctacactgttttttagggacgcctttattgctgtaatgtttttctaagtctctggtggaaaagtcactggcatttgttctagcagcattgattcattgccaagttttaaaaaaggaaataattaagagaatgcaatgacctttagagaaaacaggtcacccatgtaagtcctgctttcagggtggtgtgctttcttctgcttttagagtttcttttctcttttgggctatgaaccgtacctggaggccaggcaggccttattctggagcagatagtgagtgaggttcctagagtactgcatagcctgagagtgcctcctaagtggatgccctccacacctcctgcacttggccctggccctgggtcctaggctcattgttgatcttcttagatctgggttccttgcattgcaggacctacctcagcctgctcttgtctgcctttgctgatgcccctcaattcacctctttcctgcctgtactgtgatatggtgtgaacttgacttatactgcttgtgaaacctgagtcatgtgctgaaatcctgccccgccaccgctttcctcccttaactggatccttagccttggactccaaggctacagctctgtctcgtggccactcaagccccacccaaaggaggtgctactcaaaagtttgaggcaggagtgatttattgtgaatgacaatgttatagtttctaattctagtgtttagcatggtattattccttatttattttaaaatcttagacaatttatctaaaatgtcaatttttagaaggtatcagcacaattgtggcagccttttttctgtatgtgttatatgtattatttaaaaaagcaggttcattctatgacaggtattggtttcggtattcacaatataaattgtcttttcaagggaaaggatattttctttggaaatgtcattgaatctatgttctctttattgaaattgttctaattgactttgaactgtttctcagacacctggtgcccagtttctggccatagaaactatgtgaggctgagtaattcatgttttgggtcactaccagtcacgaatgcttctctcattccaaggctatgcatatggatgtcacattcccatgtcaatcatctctggaaggtattattcgcccagttttttaagcatgggaaactgaggcttagagtcttaaaaaataagtagctggcagtctctcagcaaataatgatggtgctgcactacagacccagatctgtgactccaaagtcagcctttgttcttttcttcttgttacttttaattggaaaaaaatttaaattgcaaaaagttgtagagtgataaaaacaaaaatccacgaatgctcttctaggattaacaaatgttgccattttggcacacttgtttctgtttttttttttttttttaaagaaaagaacacatcacagataaagaagaggttctctttttacctgtccctgattctgttccttttccttctttcaccctctcttcttctcagaggcagtttggtctctaggccatgccttgatgattttactgtgtatatatatatataaaattagtatgtggcttagtttgtgttttaaattttacgtaaattttaatttataatattaaaaataaattgtattgtacatattttgcaacttatttctcagttttgtttctgctgttattccacatagatctggattattcatttcaatggctaatatccttttatttgaatatattgtaacttatttatcctattgatagacatttttattcttttacaaacaataccaacatgtctccaggcttctctaactaggaagtatacgtaaaggaggaattgctagggcatgggattggcataatttcaccttttctagatattgcccaatcgctgcccacagtgcacatacctttccaccagtcacatgtgagagggcagattttccaaatgctcatcaccacttggcactgtgtggactataattttggccagttaggaaatggcatctcattgttttcatcttaatttgcgtcagcctgattactcattgaaacttgtgaggttgagaaacttttcttaagcttattggccattcaagtttcctcctttatgaaatggttgttcatgtcatttgctcatttttatattagattgtttttcttttttccagctgacttgtaggaactctacatcttatcaatattaatcatttatcgaaaactatttgggtgccattatcttctcctagtcaatgttttttgtttgtgatatcttttataatatataagtttttaatgttggcagaagtaaagttaatctttttggctgtgttgtgtgtcttgtttgatgtaaagatagtttctgtaatagttttgcagtttgattgttcatctttaggtcttcaattacaacctgcacatccatcccctctatcctctttcttactctgtttttctccatagcacttatcatccaataatatgtcatgcactttatttatctgttttgcatatatattttgtctgttacctgtttccttccactagaatgtaagtcccatgagggcagggacttgcatctattttgtttgtggttgtatctctaacacctgggatagtcactggcaaatgatagttgctcaataaatatttgttggacaaataatgatccatgtagaatttatttttgtgtatcatatgaataggactccttttatttttggctcacggaaagcttgtttctctaatagcattgccgtactgatttttttcacgtcgctttcgtcaagctggagttgtttcccctgtgccattgtctttgaacaatcctgttttcctgcccctctgctgaagactgaaggaaactcattccttgggcttaagagtgggaataaggatgaggaggagccaggtacaatttatggggagcttatgggacagttggtacacgtttaagaagagcctcttatgagcatgagtgcaaaaatggacatgagttcctgctctcagaggaccttctggctgacatttaaactcatttgaacttgaggcagaatgtcataggtgctggaaacacagaagctgggaaacttagtggttaagttcataggctttgagtaaattcagtctgcttttgcatcctgcctctgctactgactaggctttgtatcttgagcaaattatccaagattcagtttccttatcaataatatgggaatggtcataacattacctcctcaagtggtagttatgaggattgactgatgtgatgtgtgctaaatgcttagcatagttcctgccaggacaaactaattctgatgtgggtggagagtctttagggaggaggtagtgtttgaccaggccttgtaggatgggttggatttttctaggcagggattgaatgggtggacatgtcagacaagatatagaataaataaaagcaaaaacatgcagaccagaaagtatagggtgagttcacagagcattcatctagtttggatggtacgagggagtgagaaatgaagaggctagaaatataggttgacaccaattgtgatggtttattagcaccaagccaagaaggatgtccttcatcactctgctcataattcctcaatggctccccattgcctgatcagatatgagctccagagtggtggctctggccagtgggtgctgggtgaataggaggggagaggagcacggaggacagcaagaaggctccaaggagagccctggctagtgctagagagtgtttactttccatgcacttgaactttaggaagcgcttccaaaatgcaattttttagcatcagctttgtgccagatgtggagctaggggcttccatatatatgtattacatgaatttgaagcagttcactcccttggacactcctgttcaggatttggtgttttgtctctgaaactgaattcatcgagaaaagcacaggggtaaataagcttcatccccatctccattccatctgcctcctcttgaatcatagagggaaaaaaaggacagcctaaagaattagggccccagcagatcctttgtgacagaagatatcacatgtcaaccttcctcccagccctgccaactctccaggccagctttgcagccataggttgtcatcactgggaggatggaagcaagcaaacctctgaacagggtgtggtgtgaataggacagcctgggccttgccctcacagatgcttacttgggtcgtaatatcagccctatcagcatccagatgattgtgaagggagtgaatgaatgatgaaagtcttggcacctcagtttcatggtctggtggggataaccacatagggttgtttctgagaatcgtgagctaagccagcaaagttcctggtagcttgcatgctcctcctttcttccttctcagagaatgtgctcagattgggaagcagtttaaccgtccttccctgacatttgtacagccaagtcatgtttaggtacccgggggagccagagtgctcctcctctccttctggagaagttgggttatctttaatataagatagaaatcaaaccaaattacattattttacctcagaaccccgttgcaaccgatccttttgaatggtatagttctattattatatattacttcaaacttaataggaaaaaattgattaaaatatgtgccatgttcatatctagcctggctgaatgccacaagacacattaattgaaaatgaatttccacaaacccaatcaagcatcatgaagatgaaaaatgtacctttttccctccattccttcattgatttttcattttccccactcagtgcttcatttagcaatttttcagtttcgttttgttgtggccttaattcatttcctttactcccccccaaatgagataatgtaccattttcttcatgcttattaaactcttctttcatgctgcattagtgcagggcagattctgatcttgtcatatttctctatgcattattttttttgttaaaaataggctgagcttttttctttttattcttacattttgtggtggcttttatcaaagagaatggactttaaaaaatacagtaactatgaaattacgatgttacaggacttccaaaatagaattaaggaatgctatgcaaaaataaaacactttttctgaggaagagtgtaaaatatcaattattctcatagtcacagtgggtatgtggggaccagacacaattcctcttttgttaagagaattggaaacaatggtttaccagatcatagagggatcaagaggctgggttaaagacacagcactgtcaggaaaagagcaggcagagggagacgacggctgaagcccaagtgagctctagaaggttctgtccctgacccagtcagttcaccatttccctggatttctaggggttttgaaaacaataatggggatcttcaaagtatttccttgtaaaattttcaaattttcaaataacgtgatggcataaatttcccctgaaaaggctgtaagaactcacaataaagtatcatattcctctcttttgacctagaattcatagccctagtaatctcgttttgattagatgctttgattggcagttatacatctttgataacattttcaatgtgaaatgaattattctttcgttaaagccattttaagcagaatgtctataaatgagggcccacgagaaggaataacaaagcaggggtgttggggatggtggctggggagctttggtgtatttattaacctgtggttgagttttgcgatgtgtgcaagtacacacagccccgacactctgattttgaaaacaatgaaatgaaaatgaaatgaaaacattataaagaaatttcaaataaaataatttaaaatgtttattgcaggggaagtttatgccattacattatttgaaaatttgacaatttcgcaaggaaacagcttgaagttccccatagaaatccagggaaatggtgaactgactaggtcagggatggaattttctagagctcactcaggcttcattcatttaaaatgaaaacaaaataaaacaaattttaaataaaataaacaataatgtcaaataaatgttcaaataaaataaacttaatgtggatttaaaatactgaattccattttccttataagatttaaacagtttgattaaatgtgaccatcagttttgtttttcgttttctgtttttaaagagtttatttgagcaggcagcaccaggccacatgcaattgagggcttcacctagggggcttgaggggaaaacttttataggtgtttatggaagcaagacaaggaaaatatttgattggttaaagcagaaagtccctacttaggccacacctgtaatcccagcacttcgggaggctgaggcaagaggattgcttgaggctgggggtttgaaaacagcctaagtaacatagcgagaccctgtctctacaaaaaattaaaaaattagccaggcatagttgatcacacctgtaatcctagctacttgggaggctgagatgggaggacccattgagcccaggagtttgaggctgccgtgagctatgattgtagcactatgctacagcctgggttacagaggcaaacgctgtcaaaaaaaaaaaaaaaaaaaaaaaaaaaaaagtccctatttagaggttagaggttagttggtgttttctgattggttaaatttaaatttcattttcctaagctgtgaccattcattctgacatgggtttcagtttgcttaggtcagaacccaaggcactggagccacctcagcctaatggcctcccaattaattattttaatggttcccctcttttggctagcctttcatttgtgagagattgatcaagttttagtgtgacatcttctgttaccatcatggctggttttcctttgtttcagcgggaaactcctaagtgtgacgtcagttttaacctacctcctattatcagtaagagggggcaggagggggagttgattctacacatgacactcccagtacataatcaaagtgatgtgcaccttttatatgctctgtattggtgtgtttcctgttttacataaggcatttttcgtgtttgttatcctttgccagctggtgaaagaaaataccccaaagcacaatttcttaacagcccatgtcaagcgctgtctggtatttaatacttatttgctgctgtgttttcttcattaatttctctccaagttcaatacggagttatgtttcatgagtcttgcacaattgagtgctactcacatgactacaatgctacagccatctcattttctgtcctctgatgtgaaatggactgtgtcctacatgttactaatgggaagaaattccaggaagttgagaagcctcacaacttccagctgtggattcctcactgaatccataacagaaccatactacatttttgtacaatttcactttggtctggttgacgtataagctcttttcaaaacatattggggggactttttttttttttagctatagcaatctgtttctaacgcagtttttatttaaatgtgcagattggcaagggtgatttcagctcctgagagaagttatcttttatatgagataattgatgcactaaacacttgttccctgtgggtttggggtctagtacaagggaaaaaagtcaactaaggatggcagtaactatgatgtgtcctaacaggggtaggttcaaaggctgagctatcacagagaagggggacacaaaggcagcctggaggacttggaaagcgctggcctaggtgactgtgggtagattgtgacagcagcagtttttctggtggaaaaggggatggagggtggggaggcattcctaatggagccaccagcctgtgtgttcaaagtcctggaggcgggaccatagtgtgttcatgcagtgctgagaggatggagtgtcctaaatatagggttcattgtagggacaggatgggcatgaaatgaaagtgggaaaatagggagcacagcggaagggcctcccgtgccatgctagtgagttcgaacattaaaagcgtagggggtttttaattgggagagtgagatagtctgcattcctggtaccagagcacctgtattttgtaaaagctccctccatgggtttccagcgtgtggctatggttaaggatgattacttagctcaaaccacctatgcaggtaactcgattgtagctaatgtgaaaaaaaaaagccatgatcagttttaagaaactaaaagaacttttatttcccctccctccttaaatatcaaactggcctgtattctaagagactaacatcctgcatgattgatcgggctgcaaggcccatattcacatattcagtctgagttacaaagaaacatactcatcaaaagaaaaattagaaaaaattctattaacatcagttaaaaggtcccagattttatgaaagtgtatttttccccttgttctataaggaggcctactgttttgtatttaaatttagctgttgcaagattctgttcttgtataaatcaaataggtgaggtccagaaaatgagtgcttctaatttctcagttcttaatgccctggtttgagtttggtaacttgcgtcatttaccaccacctggtgacagctagaactaaatgcagctttgtgaagggtaaattgaaggtcaaactttaacatttaatgcatcaagaagtgagatcaaaggtgcctaatggatttcttgcataccagctatatggtaacctggattttggagtagctcctgatttgggggttgctctggggacatgtgtttagcaagatcatcttggcccaactgggcctccaagcatctgatccagacagttttccccctgaagtctatgggatggattgtttaggaatggctggatggatttgttgattcattcatttgttatctgagaatataaagatgatcaaagtctttactcttgggaaactcacagcctagggaaggagaaacatcagtaatcatataataatagctaccttttgagtgtttatcatgtgctaggtgctacaagagacaatatttcaaggttctttgaagttagtagtcagaaacaataccagccacacaagtgtgtgacttaaagtttgtaaaaaatgaaccaaaggcttgagagtcagatgttcctaggaggctatcaaacccaggagcatgtgagtctatttattttagaagctgagtgcgtcacttgggaaagggatgggaggttcttcggggcagaccactggggagactaagttgggattcaaggttggcaccccttggggccggcagtgcactgactctgccagccttagcatccttagtgctcttatctgaacaagtcaattcagatcacagaatatactagaaaagaagtttctgtaagaaatgttccaggataaaagcaaatctgcacagatagcattaattcagcacaatagcatacttgtttcttggagcaccattgctgaaaaccatgagccttgttagaagctgccgcaccctcaaatcctactcctgtccagctccttctccccagaaccaagtgtctctccagactagcatcagccctctgctctctcatgagaagtctagagaccttctctctatagcactctctctaggtgatgtattaaccattcactgatttattttttaaactaccatctaggggacagtgaccagtaggatcctctcaatatcttactatgagctgctcattaaggtgttttaaaaccacctctcttgctttccttgcctcacaagccactctgatttcttcagagacagtgaaacgagtgtatttgaaatcactttttacatcatttgattaaatattacccctgactttcttggaagcttttagttccattttgcctttcatttaaagattttaaaagttaactttaacaatcttaatactataaaaaggaatgaaaaagacataccgtgagagtaatttttgggaactatttctacaaaaatggaaggaagtttacacaaaacaaactttaaccctaccacaaccccagaagtattgcatttatccaacttctcttccagcttttactttcatcattgtaaacttttgcttttctatcccttgaggctttttgtaaactttccattttgcagtatatttgtttttagtgtttgtgtagtatactccatgaaattgatatttcataatttattaccctttcctttagtgctagacattaaggttatttagtgctagacattaatagtccatattaatggaaataaccttatttctctctattataaataatgggagcaagaacatctttatatatagagctttttcctatgtttgaattatatccttaggataaattcccaggagtgggattagtggatcaaagggtatgaacagctttatggctcttaatatttattgctaaattgcctgaagggtcatactaattcacaatgccacctgcaacacaggagaggagctgcccctcccagtcctgccaacgctcatttcttcagtcaatagttttgggcaaatttaataggtagtcaagggtaaccattgctgtttttaattggtgatgtctttaactattattaacattggacattttttcttacgggtgtttctgttctattttgtatggtttacttttcatgtcaaaggattacattttttgacaccatgtgaaatttaaaatacttgataatgaaaatgccaaatgcacacagaacagagagagtaattgatggagccctctacgttacccaggttcagcaaatagcaagatttggccatacttgctttatctactccttcctcttttttcccctcttgtgcagtattttaaagcaaatcccagacattctgcatatgtttcctatacacttcaccgtgcatctctgaacatatggactttttcttacataattataacactatcatcacacctaacaaaattaatgataattccttgctattatttaataccaacctgcaataacattttccaaagtgtcttttcttctgatgctttgttccaatcagcatacactgtgtttacatttagttatgtttctaaagtctcctaatctagagcattgctgccccatctctcccgactacttttattcgtacctaagaactgagtcagttgtcttgtaaaaatgttcacattctggattcgactttttgtgtccgtgttagctctagaagcttgattagatcaagtttcaccttttcggaaaggcaagaacacttcatgggtgatgctgtgtgtttcatcgtgtatcacttctggggtgtataatgcctggttattccaccttgggtgatgccaaggctgataatggagtcaagtggtgacaacccaaaacatgattgaatgttttttcattagcttttaccatcatggtttaatctactgatgatggatgcttgaagccattatttcatagaaattgcaaaattgtgattttctaattctgtcattccttggccattgattaactggaattattctgtcaagtaaaactagggctttttagagtctcaaaatgcagtttgaacagagaaggcaagacagatgctttattttttcctccaaactcctttccaagtaaggagttgatgccttttttacatccattggagtccagtgagctgttactgttttattctaaagacatataatagtcatgttctttaatatctttatatttcatgtgttttactcaattacactcattattatttttgatgttcagaatgttccatccttggcccaaggggagacacctcatgtccttgttttcaggcataacaaggtatctcacgttcatctagtttatttttttgtcccctgaaatgagccattccaccaagatgtcctgtgtttttttagtggggaatgctatttagagaccacaatctgcacatgttatgttcttattgtttccaagttttctcagtagatagtgtagagatacatattttacaaaagaaaataaaaattatgaattcatactgatattgtcattttaaattgaacaaaattttgtttacttctttgatttcacacttgtattgctttctcttacagtaaaaatcttggttccaaacatgatgataccacaatatacatcaaacggtttcaaaataacttcagtgttactgctaacaatcttctcagtgaatgagagattactttgcagctctatttatctttaataatccactaagaatattgagtcaaattactgtattctaataacacttggattaatacttctcaccaatttgatatacatcgtttcttcaattcagtttgttctcagattttagggttcactttttttctttttggcttcattttattttttgaatctgtaaaatatgctttcaaagttaaacctatgtaacaaggcttatgtttattacataaacctatgtaataacttatgttatcctgtctccttcacctaagttcttccctttccctattggtagctatttattaataattagggttcattttgtctttgcagtgtttcttttgcaaatacatgtgcattcatgtgtccccacctgttttacatcaaagcgagtatactgtctaccttgccatacacttcatcagtgtttttgagatctgcattttttggaaggttacacagacctccatcataccatgcatggtttaaccagtcgcttattgatggagttctgttttgtgtttcctaaaataacacatatcctttgttcatatcatttcatattttggccagtgtatctttggtatctattcctaaaaatggaattgctgagtcaaagggttaatgcatatgtactttttctagatactgctatattcgcttccataggaatagtgtcattttgcatgagaaggattttaaaatttgttttgttttcagacagggtctcactttgtcacccaggctagggtgcagtggcatcatcatagctgacttccaccttgacctcctgggctcaagcaatcctcccacctcagcctcccaagtagctgggactacagggacacaccaccacacccagctaattttttgattttttgtagaggcagggtctcactatgttgcccaggctggtcttgaactcctaggctcaagcaatcctcctcccttggcctcccaaagtgctgggatcataggagtgaactactgtgctcggcctgagagtgattttttgaaataattttgtgagcacacaaatttaatatacaggatttttggaaagttaatgtgttattaatgatcctgcatactgttcccactattatgcataacacggcctggtacagagtactctggttcctgccttcagggaagctatggtttgtctagggagacatgatgtatgattggaaaacaaagagtagtctaagatagaatatattataaaaaacaaagatggatctttttaggaagcctttcttgcttactccaggccacatgagtcttcagtcctctgaatttcaacacttttaatgagacttctaatgatccttttttcaaaccaacttttgacacttggttgaacaaatatgaatgtattgaataacacagccaaatgtttgaaatgcaggctgccctgcaaattcaagccgaataatcattttttggagagttgtatctacatttcccaaagcatgttctctggaagatcttctggctgttttaaagggttacacagcaaaatcagtgtggaaatgttggattaatcaaagctgaggagctgtgactccagaatcatgtctgctgccccaagctcacctgttcacacaatccgcctgtcttggagcgtctcgcgttaatactgttccacgaaacacagagaatcagtatgcaggctgtttcaatgaaaaccatccagccccactggaaatgaggaaaaatagaaatagaaataaaaataaatgaaaaccaagggcatctattccagttgataaacctgtacttacacaattgtacatttttgattaacaattttccatccctttctttctagattgaatcattaaagaaaaagttgcaacagaaacagctcttaatactgcagcttttagaaaagatatctttcttagaaggagaggtaaggatctctgtttctttaagttggtgtcttccctaccattaaattttatgttgctaagcctaccaccgacacttaattaaaaatatggctatttcccggccttataaaattgattgagggttaagtgccagccttgaaaatgaggttctgacagctgtttttcctttaccatcggactcccctcattccagttgctgctgacttctgctttttggctctagtttttcttattaaagaatcatcctagcaagcctgataagctgttgattagcactgataattccccgcatttgtccagtgctttataatttgtgagatatgttcatatacattccttacattattctctctgcaactttaagaaaggcaagactaagattattatctctgtattaatacatgagaaaacagaggcacagagaagacaggtggttttgctcaaggttgcccagcttaataaatgtcagagccaggctgaaagactcctaaatccagtgctctcctgtcacagcgagtgaagatgtgttagaggggacttaattttacctgaaactttcagatgcttagtattcttgactttctggctttttgaaagtcatttggggattttgtatatgttccagagaagaatattatggggttggaagaactttacaaggagaagtcaaaatctatttgctctaaaggttctttattagagcttggcattgagcctttgccttttgagacttcctgaaaagctggtttgccaagcacctgtccttatctgtgttcctcgttatagtccttccacagtgagagagcccagcagacaatgataaagtaagaagaaagagaagagaaaactttgattaagccctgctgtgtgttgggcactgttagttactttggatatgttctgtgtaacacagaagttaagagtggaatccaacttacccaagtgtgaaccctggatctgcttcttatcagctgggtgatgtgggggaagtttcttatcattataaaggagggatcataactgtgctatgtgtgggtgacagtgaaatcagaatgtatagaaggtgcctggcatgtactaagcactcaataattttaaacgtattattgttgttccctctttattaaaagggacaccctctgagttagatgatattttcccccttttttagatagggaaactgaggttcgggggtattaagaagtctgcccaaggttacagtagagatgggtaagcctggatccagatcctgagctctgaaccaccatgtttgagtgggtggtgagctgagccttcttttactctgtttttgaggggttgccttacagcagtcataaccagaagtccctcatggcccataggggcctggcaccagattcaacgcccaagagtctctgtcttttgaagctgagtaaatgggtattttccccatttccactcctgtcttccctgccacagtcattggctcagtgccagccttgtgaatgaacatttctgtttctaagattcctttctgaaattgcagctccctgtgggaggaagcacaccttccccagtaagagtcagaaaatgagtgccctagtggaagcccatgtggccaaagagaaggcagtcacaggagagaggaaagacagactgacaggagaggcagaaggtcccccaagacagtgccccccacccccacctctggctgtgctgctaaagcaagctctcctactggtagattcttaaatgtccaagggaatattgcacatggggagtaatcttagaaatagctatgttggtttatgctcagtgtattaaactcatgtctcaccttagtttgggttgctccagcccttgaaatgtggagtccagatagtttatctgggaggcgatctcaggaagccccactaggggaatggggaaaatgagacagggaagggaagagagccaatagcggtgccatatcaaggaggttgccctgaggacagctgaggctcactcctgctggggatctctgggagatggtgtggaagtggccctgagctttccttactgaaaggccagaaagctggggcatttatccactaactcccatcagtcattagctgaggcctgctctggggggttgtggcagttctagcctgccctcggcagagccagttagactctggtggtcaaaggaagcccccagatgaagaatcaccagtggcctgttaggaaacaggaatgcccagaggatgtagcggggtgggtggcagtgtcagctatgtctatctaataagcaagactttgaaaaccagtttttttttgagcatatcaataatgattatcaatttgattgattaaattccctgaaactatttaaattccaatacaaatttattatgactaattgcttttggccacttcacacatccaccttaaatagcagacaatatatacaaaaaaagttgcataataacaagatttaataatacatttagacttaaacctattctaaaatactaaatatcatgggttttaatttattttgtcattgtttctgttcttgttttttttttttttaaaccttcctgaggccattgttttacttctttcaatattttcttagggctaacatcattttgacacctttcagacaggtgcagtcatctttgagatccaaaagagaaaggataccttctctaaattgctaagattagaggatgtgggttacataggttcttggttgggtcacaggaccctcagtggcttcttccaaggtgattcaaacacaggactccttatcactgtctttagcactattaaaaacttatgcattctttatcaatatttcatcatacatagctaggccatgtagagatctcctctcctagggaatcagaggtgacattcaaatacttggttttcctctttggctctcagactagctgatcatttacacacactctgccgacgctgttccttgctaattgtggatgatagctaatgctgacacgttgctgcccaactctccacttgattgctctacggcacggatgctaagcagtccttctccaggtcctgaagtcctggggtgacctaacttacatgttctttagttattctttctaacataacagaaaacttttaaatagatatctaattaatacctcctaaaagaaaccacaaaagttttggtagataaatctggtagctccccatcttactaataagtagctacatttgtgaagagtgcaattgcagactccagactcagactacctgagtacaaatctcagctctgccacttagtagtgatgtgatattgagcaagttaattaactgtcctatgccttagttggcttattggtaaataggaactctctctgtgaagtggcatcctctccatagagttgttatgatgattaaatatgttaatacttaagtgattagaaaagtacctggctcatggtaaatgccatatgtgttactgtttctttaattgcctgcgtcccagggactcttttattgtcattgataaatattttagatttatagctatgtcccataatgaatcactctttctcttttgctcatcctcaaagttggagactatcatcaaactcagctgtgtgataatttaacaaagagaatttcacctttaggtgaacatgagcagggattgtacaagccaggtcctactagcaggccatagggcccagcagtcctttgcctgcagcaacctgaaaggttcatcctgggagggtgaggctggacgtgagtcttataggctggcaatatttcagcttcttttagcagttggccccgatatttgcagaattcataggagtttgggattcatatcaagtcttagagtttaagtgtcataagctgatggtcttgtatgatgtcattactcctattatgtattctggctccatgcccaggcagtatttggggatttattgatcatgcctgtgctcctcttagccacagtgctgttggttttaaagaagcaacccttagtttcagattgaagagccttggctcttacacatgtcctcagttagtccagttcctagctgttccccaagaacactttagctgttctgcttcttgagctacgggttcaggactgcatgacatatccagcactgtgctggagctgcttcatactggttaatgaaagcggaagacatgcatcacttctcaggtctccatttggggatgtcatgttggtcgcttgcaattagctatggaggaggtcttgacaccacagaaattgacatatgtcacaatcagagctttttaacctagggattttattgtcaaaaatttactagtgcaccattagtgttatgtaactctgcagttatacctaagggctttgtgtttttaccctgacacctctgcttacaagcagagtaactctgggcaggtaattctacccctctgagcatcagtttcagcatttgtgaaatagggataatccctcccacttgaaagaaactttttatgattaaataatagatacaaaagacttagaattgtgcttggcacagtgcgaaagatggacaaatgttaattctttcttaattactcaaccttttggagacttcggttctgactcacattctgccattatctgtgcatgaccttgggcaaatcatgccaccaacaacctggactcggttagttcatctttaaaaaagggagaaggcttagatcaactctgagattattaccatttttaatgtttgaaaactttgttgaaatgttgaaatcgtattaggatcctagacagttaagggaacaccctctacctgatcctgggctcggagaaaaggacaggccctttcctaggtcatggctgacactctagaacccttcttcttttcttttaaaacagagaatatggattattttagtccctggattcatcatttgtgcttacctgggtttaaactcattagattttgaactccctcctccctctgccccaaatccaaatgacacagcagactcctaaaagcttgctctagcctggccctgtcagactacattttcatcaaccaatttaaaatcttcctgatcccgctgatgagtgagaacatgcggtgttcaggggacataaacatgggaacgataaacactggggattactagatgcgggaaagagggagggggaaaaggtctgaaaaaccacctactaggtactatgcttattacctgggtgatggcctcagtcataccccacacctcagcatcccacaatatacctttgtcaccaacctgcacatgtgccctctgattctaaaataaatgtgaaaaagaaaatcttcctgataacaaaaatatgcccattcttttttctttttctttttttcaaacaattttttttattagctcaacttctggagaagaagaaatattctccatttccaatatagaaaatgttcttaaaataacattgcaagcatttatcttcataagctttctgaaactctgaacagatttcgttacacttttctctgtcggatatactacacttacagctcaattcaaaagtcagaggaaaggagtcaaatgtcttggttttgtccatcctgcatttaatgtgtgttgtgtagcacctgagcctctcagtgtgtctgttatgcattcttgcgactattattaatttttctgtgtaatgttggagcggcagcaccaggcactcggctccccacatgcattttatggaacacacattcagtgtatgtgctacagcccccgagctgcccacacccctgggcctgaggggaatggtgggggaggtgaccgccaaacattcgtgacataatttccaaaaaatgtccagaagtgctgcacattttctcccttcgtgaaaggcacatgtgcctcccaagccattgggttggtattcgttacacatataaacacaagggggtggtgtttgaaagcaggaaaaccatggaatttgcttctcaatcccagaagcaatcttttttgtagcacagtccaggcagcagtctgaggctattctttgtcgttccactgtagtcatattctgcaagactaagaaggagatagtcttgatttattgtatcaaatcggttaatttaatttttaaagacttttcttaaatctgtcccacgctctctaactctcctcttactgcccatgttcaggctctcatcatcttttattttttaccttatcaacttagttatttattaacttacataaataagtttctgttatttattaacttacataagtaagtgtttctgtttaagcatataatccactgagttttgacagtgtttatacccatgaaataaccactacaatcaagatagagagaatttctatcaccccaccaaagattctgtttcagtttgcaacccagctttccattcatccctaggcaattcttgatcttttttttctgtagatggtgagtcactttttatcacttttggtcactatggatttccatttagtgggaatccactgtatgatttgcatttctagaaatggaatcatatagcatgccctcttctctgtccagcttctttcactcagcataatgatttgaggcgcatctaagttgtatgcattcccttttgttgcagagtggtattccattgtatgaatatatcgcagtttattcattcagctgacaaaatacatttgagttgtttccagctctgggctattgtgaataaagctgcagtgagcattagagtacaactcattatgtgaagatagttttagttcctcttgggtaaattcctggtagtggaatagctgggtcgtaaaaggaggtataagtttaactttttaagagaccgtcagtttttcaaaggggttgtagtattttaattttccagcagtttgagtgtaccagtgtctccatatcctaacccagacctagtattgccaaccttttaaatttagccattcagtgttatagcttttagaatttgtctagtaggttttctggctttgaaagctccaaaataaaaataaaaacaaaagaaaataaattgagccatgctaggggatatagagtgctgtctcatgtggttttaatgtgcatttccttgtcaactggtgatgctgagcatcttttcttcttttcgagaatcttttcatatgctttttgccatttataagtttcatcttttgaagtgtctgttccaatctttagtccgttgttttattgagcttttagttttcttactattgagttggaagagttctttatatattctggattcgagtcctttgtcagatgtatgtgctatgaacattttctcccatcctgtgacttacttttttgttttcttaatgatgtctgttgaagatatatatatatatatatatatttttttttttttgcaatggggtcttgcacagatacccaagctggagtacagtggtgcaatcttggctcaatgcagccttgacatcctgggcttaagttatctcctacctctcagcctcctgagtagctggcactgcaggtgcatgccaccacgctcggctaatttttgtatttttagtagagatggtttcaccacgttgcccgggctggtctcgaactcctgagctcaagtgatcagcccatgtcgggttcccaaagtactgggattataggcatgagccaccatgccaggccctgttgaagagattttttatttttggttttcaattaaccatttatttcttttatgatttttgtcttttgtgtcctgagaaatatttgcctactacaaggtcacaaatatgttctcctgtgatttcccctaagaattttatggtttttacttgtttatttagttgatccattttaagttgatttttgggttttgtgtgaagcaaaggtatcaatactctttttttctacacagatgcccagttgtttacttttaatgtctctttaatttctgatattatttgtaccctctttctctccctatcttatccactctgtgtctctgtctctctttctctttctcttctttaaccagatagtgggttatcaatttttgttgattttaaaaaataattaaaatagcttttggctttggtgattttctccattgcttgtctgctttctattttattgacttttgccctgatgttcattacttccttccttctaattatttcgggattactttgctcttctttttctagcttcttgaggtagaacttaggtcattgattttagacctttcttcttttttaatataaacctttaaagctataaatgtccttctaatctctgcttcacctgcatctcacaagctttgatatactttacttttattatcttccagttcaaaatatttcctaatttcccttgagatttttctttgatttatggattatttagaggcaggttatttaatttccaaatagttgaaatttttgttgatatttttatttctaatttaatacttttatagtcagagaacacagcttgtatggttttaacttttaatttattgggacttattttatggctcagcatatagtttcaattaaatttttgtgaaaaaatatatattttgctgttgtgtatatcctacaaataccagttgggtttaggtggttgataatattgtttagataactgacatttttcttggattttgtgtaattgtcctatcaattgccgagagaaaggtgttataatcccttaccatggttttagactgtctctttctttgtttttactttgtgtattttgaaactctgttactaggtatatacacatttttgttatgtcttgatgatgaattgatctttacaatatgaaatgttggtccctacctttgtcaatactctttgtcttgatatctattttaactgatatgaatgtagccatttttaccctgttatatttactgtttacgtgctatatattattccagccacttactttcaactgatttatatctctgtatttaaagtacatctcttatagaaaatagttgggacttgcttttttatacatagttatagtctctgccatttaattggagtatgtagtttactaatatttaattatatttatatgattggatttagagctaccatttcattatttgttttctgtttgttccttctggtttgttttgcttattttgcttgcttgtttgttttgttctcctttttgccttttggattatttcaattttttaaaaataccattttaagttatccattggcatttttgctgtgtctcttttctctaatatgttggtggttactctaggtattgtagtatacatcattagctgttcactgtgcacctagagataatattgtaccatttcttttaaaatgtagaagtcttgccatgatatacgttcatttaccgctgtgcctgtggttataattttatatgtattgtatctatatacattataaaaccatgatacatgattatcatttttgctttaacaatcatatgtactttaaagaaattaagagaaactagattctttcatatatactctatttctgaaggtctgagtttctctctgatgtcatctcgcctcagcctgaagaaattttatttagaattttgtgtagtgcaggccaggtggtaaaacattctcttagtttttcttatctgaaagtaaggtttttatttcgccttcattattgaaagatatagagctctaagttgccggtttatttctcttggtactcattgtttctgggttccatggtttttaatgaaatatctgtagtgattcaaatgattatgctcctgtatataacaggttgctttcaagatttttcttcatttgtggttttcagaagtttgactgtaatgtgtttctctttgaatttatcctgtttggggtttactgagcttcttgaatttgtaaatttatgtctttaactaaatttggggagttttcagctattatgttttacagtaattttctgctttagttttcctctcctctcttcctttgactaaaaaacccgtatgttaggcttttcaaattgcttcacagttccacagtgctccatttattgttttcagtcttttgtttatctactttcaattggataatttatattaatgtattgtaaaatttactgactttttcctttaccatcttcagtcttaagtccatctagtgacttttaaaaaaaaattcaggtattgtactttcctgttctaaaattttcatttagttcttttttgtattttctattttttttactacttcattaattgtaagcatatttttctttgtctgactgatcattgttatgatggctgcattaaagtctttgtctgaaaattccaacatcatagttacatcaggattggtgtctgttgattctcttttcccttaggagtgggtactattttcccgactctttatatgtcacataattttggattataagctggacattgtgagtgctttgttgggttcttgttttaaaaggcaatgaatttagccagacccaactacatcctgcctgtctgtgatgctgatggcagatctcagttcagttctttaaacattagctgcaaacttctttcagttttctccagacatgcatggttcagtggtctaccagagacttgaactgagtctgtatacaagaatttagtgttttcccccaactctgactctcctcttttgccttctcccctactgttagtagccctggcatccttctccgggtttcttcccccagaaagatgatctttctgttaatattttactttatctctactgccaccaccatgactgtgctgctctcagggcaaatctgccagcaaaaagaaaaataataaaacacggagaatatagagaactgcttgccacatgcttcaagtttcacctcatctccaaaacttgcctgtctttgttcacttctctagagatctcattagttgtttctaatctgttattcagaatgtacagctgtgagttgcagcaggatcagtgtgttgagtgcatactcctctcactgcaagtgcagcccccactctttagctgaataattgcagtggtcttcctgctgtctttagtcttattttcctccaatccagctttcacttgggagccaggtgattaaaataaattctggtgctgaccttgctattgtaagattgatttctaacttcttgtagtggcatacatagcctttcattaataacttctacacacctgtgtaatgcaataaggtgccttttctcaacccagtgtgtttccacagttctggaatactcatcacctttgatttttcttactctctttcccttgcctaactccagaaactccaccgctgtccccattttgagtcagatgtcccctctgagttccctcttaatattctgtggatccccctataatgttacttagcacatcgttctattatttgctgctcagttatctgtattcccccaagaccgagctcctcaagggttgcaaatcatgccatatttctttaacttctaactcttccctcacctaatttcactgcctgatatatagtagatatacaataatttttctactgattgcattatattctcatgagtatacattttttatttctgtttctatgggtgtctgttgtgcacacacagagttcccatgaaatagaacaaaggatttggggtcatttgtcctccattcactgtgtatcagttgcggcatatttgctaaccttgtcttttaggccccctacctataggtattagacccagcatgctgtgaaatccttatgattaaagtctttacactaagaagggataaggcgatggtattactggagtatccagcaaaggcaggcgtcttctgcctttctctttttttataaattggagagttcagacattgctggggaagctcactgtctctttctctctctctctctgtctgcacgtgtgcgcatgcgtgcatgcgtgtgtgtgtgtgtgtgtgtgtgtgtgtgtgtgtgtgtgtgtgtgtgtgtgtgtgaatgctgatgactctccgggaataagccagcactggggatgaggtgatagattcagaacccatcgatctgtcatagcatgtcatctactaaggaatctggaaagcattctcttcctttacaccatttcttatttatcagaaaggattcattgacttttacattgtacggaacatggattttcacaagaactgatacgttgctccttggtatcaacctttcagagcgggagctactgaatgtttaacccacatcctttctttcaaaacaaatgagcttctgtctccatagaacttttaaactttcttgtgttacctagtgtcttagaatagtgcctcagcttcagctccaacttaaagaagaaaagaacaaatggtttcatttctagttatgcaaataaactgctcattgtaaaatcatttataaatttatttatttagcaaatatttatcttgtatctgctgcatgccatgctttgagcatacaaccaggaagatagatatgatcactgcttcatgaacatttagtctagcgttactgaaaaatatatagaagcactttttaaaaagcatcccagaatctcaatacgcagacataaccactgttcacttctttctgaatattttttttttggcatttttgcccttcggatttcaggcaccagcacttcgtctattttcatttcagtatcttcaacttctttgtctattttcattttggtatctcttgcttctttgtccttcatttcccccatgaggcaaatctccaattgctgagcatctaatctttaacttatgtaatgtttggctctggcccgaaagaaaaaaaacttttcagaatgtgaattttaatcccaaggagcttgttctactttatatgtgtgagattctgaattttccacacctacgaaagactaattaagttatagaggtatttcccactgttaaattaaattaacagacttgctcattttatagtttaatgaggaggtgttaaaagttgggctgtaccttatttataatggcaaaaacgtgataaatatctaaatgcccatcaataagagactagttaaataaataatgtatccatagaatggaatactattaatgagttaaaatagtttgttgacataaaaagaaaactaatatagatggaaagatagctacaacaaattagtggctgaaaaagcagattataacatagattacaatattttgttttcatttatgtaaaattggatgcacatgtctgtacatgcatagcaagccatttgtatgcattcagtcaatctatttcttcaacaactattgtgtaagtgatgctctgtaaatacattgtgatagttgcccatgtcatggggcaaaatcagataatacatataaattgtatcatgcatatttgagggggaacatatttgacttactgaaagtacctttttttctcatctccagaataatgaactacaaagcaggttggactatttaacagaaacccaggccaagactgaagtggaaaccagagagataggagtgggctgtgatcttctacccaggtatttaggaatttcctgatttttttttttattcaaattcctctttggctgaagaaaatactttactaggctgttcttagcagaattgcattcttcctatcacaaatatttctgcaaagccgagtggtggctgctgagaggcttgactggtttctgtaggaacaggggcattgtgcagggtggaggggtcagcaaaggagagacctggggaagccatttagagagagatgggccctgtcagtgagtgaatgcatttgttccttccttccttccttcattcattcaactaatgctcttagtaccttccctgtgccagacagttatgacacagagaggagtgagatttggttcctgccccagagtacagtctggagggagagacaggtatgtaggtagacatatataacggtgtgagaggggcatccgaggtgctttagtgatatacaagagggaggatctaaaccttgaacaaaagtcatctgttcctcagtactgtaacagggtattgtcaagcactggatccagttcataaatacctgatctgcttgagtcatcggcagatatgtgataactataacctggtttgttcagttacattcctgagctagaggactgacctgttcattgttaagctgcttccatgcttgcgtctcttcctggtgacattagagcctgtaacacagtaacctgcctctgataactaactcaccattcccgggtgctcacaactgtgcctggcctcaagaggacataaaacaagtttacagcaaagatgctaatgacatgtgacttgtgatttaggtaatcaaagtcacaaaatgcctggtatcgtgtgtgcaggagggtggattcttgtgtgaacaggggcacttgtgtgtgctttgctggacatagtagtctagaaaaatgtcgaatcctggaatcttgagtggttacagctggtgggaagtagtgacgagccgatcaccaagctggggtgtggaatacctggttcttgtcctaccagccagcagcaggatgccttcagacaggttcttcactggggcctcggtttctcaacttctaaagtcagtgatttgactaggtaactgctcaggcctctaccagctctaacattgtacagtaaggcctcctttccttactttattaatttttatttattactggtattgtcatttttgttaattaaaatgaatcacttgccattctcaaagaatttaccaaaagcggcattaggttctttctttgacagtgtcctcaattacattgcttgccttctagtaaaaaggcattttttatcagtccaatataattaatagaaaatgttgaatatatatatatgtatatatatgtgtatatatatatatgtatatatatatatatatatatacatatatatacatatatatagactccggatctcatcatattcagatatattttcatatatgaaaatataaccaaaaagaacgatcaattgtgtacagagacctttttgaaatttaaataatttggccgtttcccccctttttgtatttttcaaaagccaagtggcctagtccactctaattgcccacataataaatcttgtttggctaagacgggtacaaaactatgtctgaaaccaataaattgtttgttttctaattcccgcattttggcttaaaacaagcttttcaatttgtatgcccaagtatagcctgaagcaaacttttatggctaagttatgaaaccacaaagcggttttcataatggaagtgctgacagacccttaacttatggccatggtgaacttggaagccacttcagtatctaaaagcagcttttccataaatgtaacatttggtttccccccggatccatcttagcagtttaactacctaggtcaatcagcagaggaaatgaaaactacatatccgtgtttccgaaaaggcagaataatatttcattcgtttcctcgcaaatatttattaagtgcctactatgtgaaaggcgccagggaagtctgggtggggaggagcccagaatctttcggtaactcagggcagtggccttccacctgcgcttcttggaactgccttactctgagctggggctcctggagaggcttcgggatgcccggggggatgaggagggttagtgagcggctggaccgtgggacccttcttcctccccaaaacaactgagaaagtcagcttttagtttgttttgtctgttggattccaagtaagattctgtttgaataaatagctctatgggcaaaaacaaattggaactcccggtctagttaatccccatgttttatggatgccagaactggggctcagagagatcaagtgattcactggaagccacatagccagaattagaaccaggccttcttgagtcttggtgcagtacatgtgtagtttgaaaatatgtaataaatagagagctactaaatggtggtgtgtatgttctaacaaaattcctggttcatacttggacttcaaatttgcatctaactaataaaagattccatggtattgtccagaatgttttttagatttttgtttctagaatgttttagaccaatacaagcattgaattaagcctgagttatgcagaagcgttttgttctttgtccctattcttctcctacaaggaattcaccagtgtggaacagtcagggaggctcaggctgtccagttccctgcccagccagctgctagctgagctcagccttgggcaagttacttcatctctctaaagcttcaactctttcatctttaaactaagaatgaagaggataatatcaaacctcattgggttgctttgaagattaaataaaaatgtgtacataaagcatttagagactgggcatggtgggtcacacctgtattgccagcactttgggaggccaaggcgggaggatcccttgaagctaggagttcaagaccagcctaagccacatagcaggaccttatctctaccaaaaaaaaaaaaaaaaaaaaagaaaagaaataaaaaataggccaggcatggtggctcatacctgtaatcctagcactttgggaggccaaggcagtggattgcctgagctccagagttcaagatcagcctgggcaacttgatgaaaccctgtctctactaaaatacaaaaaattagccgggtgtggtggtgtgcacctgtaatcccagctactcaggaggctgagacaggagaatagcttgaacccgggaggcagaggttgcagtgagccaagatcatgcccctgcactccagcctgggcctgggcaacagaatgagaccccgtctcaaataaataaaaataaaaatgaaagcattttagcatggtaactggaccagagttaagcacttaataactaatagctattactattaatattaactaaacccaaactctgattttctatgtagaacactatataaaatacaaaaaaatctgagtatgctaagatgatttcattaactttttattggtggtaatcattgattttatgaaatggattgatagcctgatcaagtatatagtacttcagtatgcattgggctcttcagttaaactctctagacaccccgtctagacactgtgtaaaactctgggaggcccagtgattgataaggtctctgtcagctaagacctgagagtggcccctgcgtgctgtaggcatggggcacttgtcttattgtagaatagcatggcctctcctactcactcatctgtacaactgcaagtgttacatgctgtgctactgctaatagcatttttagagctgctctacttttttttttgtcttgtgtgaaaaaaaaattgcatttagttgccgggtgtggtgtctcacacctgtaatcccagtactttgggaggccgaggcgggcggatcacctgaggttgggagtttgagaccagcctgaccaacatggagaaaccccgtctctactaaaaataagaaattagccaggtgtggtgacacatgcctgtaatcccagctactcaggaagctgaggcaggagaatcacttgaacccaagaggtggaggttgtgttgagctgagatcgcaccattgtactccatcctgggcaacaagagtgaaactccgtctcaaaaaaaaatgcatttagttgatgctcaataaacatttgttgggtgaataagtgaaagatacataccaaatgaagaacataggcaggtgatcagtattatcacatgatttatttatttaataaaggccttggatgaagtcattcctgcttatgtttcacctctttgtgtgtgtgtgtgtgtgtgtgtgtgtgtgtgtgtttctctctctctctctctctgtctcctcactagaatatgagctccatgagggcagggattttcatctctttcactaattgcattctccctgggacctccttagagcaatgcttggcacatactaggcactcaatatttgttgaatggagccatctccctgtagcatttgacaatccttcctaagaagaaaggaaggattcctcagcctatttcctacccttgcaggacttttctctcctggttctccacctatctccctggtctgtccttctccagcttctctgatggcttcttttcctcctccaagaccctcccatggtagtccacatggctctatcttggttccggtactttctgcaaagattacatcaagtctcacagcttcacctctcccctctgtggctgagccacagaagtgtgaacctttctcttgaatacaagtccttgttccccacagccttctgggcacactcccagctggtgtctgcttggtcttcatacttgccgtttcatggccgagtgcgccatctctttcttcaaagtctctcctcttaggagtgagtaagaatactggcttggaagttagacctgggtttgggtcctgagtccgcctcctgctttatctgcagctttggcaaattcctaccctccttgattctcatcttgaaaaggatgattttggtggcaatccctttggaagcttgttgagaggattaagggaagtaacaggcatagaatgtccagtggaagtgccccgccttttcatatttctgtggctgcagccactgctttcccagctacctaaactcagtatattgcagtcacttctgagtcagagaattattttgctccttgactcactcactcatactgtgctgttcttttccttcatgacttgactccttctttcccattcctcttgctgccagcctgcctcagactgtctaatctactcagtaccatctctctgcctcactttctcctcctcaaattcttcccctccttcatctaatctttgttttccataaatttctagtgaccaaggatctcttcataaagagagagggaaagggaaggggtgagaggggactcactgtgggttcaggagttcacacacacacacacacacacacacacacacaaatgtatgtgtgtatttaaagactcaggagtttagtttgaaaactttgatatatgttaattaaagccattgagaacaagtgcaggtcatctagccttcatttacaaagaaaaatgaaaaaacaaaaacgaaaggaaaagtgacttttctttcttctgccctgtagtgaaacttggtttccagcaaaccagcaaacttggttttcatcaattatgtcttaataggtgcaatatgatgaaaaatattccccatggtcataagtgctcagcacgtagtaagtgctttaaaatgcttatattttcgtatttcttttgcaaagaccagaacacaaagtagctttttgtcaaagctttatttgctgattctgctattgttttccccaggggaactgcccctttattgattaataaaaggttaacaatagcctaaatgtgttaaggcaaatggttgggtttcagttttgtggttgaggttatttgtgttcttgaaatcctgttgtttcctagtgatcaacaaaataaaataccccacttcttttttaaaagatcgggatatgagagcctgtttttgaacctagaaggttcacctttataaatatttctgcattttatgggctttcaggatattgtcattggagactgtttctgttatgcagaattttcacaggagttggcacaaatagccatctggcttctgcccctggcattccactaaactgcctggtcaggtcagtggggcctcctggatcaccaggtcccatggattgctctctgtggcaggtgacactgggaccacttacttcttgaaactcctccaacctttggtttcctttgtaattcatatgtggggtaatagctctgtggctggcttctgtgagctgctggattcatggagatgacggagatgtggctttcacccttaaagaaattatacctagcagtggacacaaatgtgtagaccaacaagtgcaataagatgctatagaggcttggcgtggtggctcacgcctgtaatcccagcactttgggaggccgagttgggcggatcatttgaggccaggagttcaagaccagactggcccacccagtgaaactccgtctctactaaaaatacaaaaattaaccaggtggtcatggcacgcgcctgtaatcccagctacttgggaggctgaggcaggagaattgcttgagcctgggaggcagaggttgcattgagctgagatcgtgccactgcactccagcctgggcaagagagagagatttggtctcaaaaaaaaaaagctatggaggtgtcagaagcctgtataatagtgatgttcaaggtgtatatggggattgggtggagaatatggagaatctcctgggggagacatgcaaagtttaaaatacaccccctgccatgctttttaatacatcctctatcacctggtgaatgactggatgtgggaagttaggggaaagggattcgactcttaggcttcatatacacattttgtcatcgtgttggttgggataaggaatgtagctatttgaaagaacccacagatcttggtggcttagcatggtaaagattaatttcccatgtcagtttaaggccgtttggtataggtttcactccacacagtctttcaggaacccaggaattcctccatctagcaaccctgcctgagctttggagtcctcctggattctccacttgtatgctctacataaaagggaagagagagagagagcgtgggggattatgtagatttttatgggttaaacctggaagtagtagaagtcatttctgcctgtttagtcacatggcccacctaatggcaagagaagctgggaaatgtagttgagttgtgtgtccaggagaaaaaagaaatgggatgtcttagtcacctaatcctgttaactataactctcaaatgtctccctaaaatctccccgccacttcccatcaagtgcttccgtcagaattcaagttgtcatgatctctctttcacctcctgaagagcaagaattttctaactgacctgccttcagaataatccttccctagtcaaccctcgatagtaccagaggaatcttgctagaataaaaatatgagcagatcatggccctccttaaaaacctgctgtagttccctgtccccttctgaactccttagccagggacatgggacccttctccaccaggcctcatcttctgccactctccattgtgaactctttgttccagtcgttccaaaggagcacatggtttgcagttccacatccacaaactgtgtgctcacccatctctgccttacacatactgccccttcttcctggagttcccatccccgctttgcccgcttgatgagtgctaggcatccttcaagattcaccttctctgtgtgaatttctagatgtgaatttcctggtggtgctaaattgttctgccctcaattttcccatcatgtgttcatgctcattttgttcaggtcatggcgggaagggaggcttgagagttaaatgaagggactgttgtggatgtttgggcaactttaagggaaataaacaagggacagtggcaggctgtggaactagcaacagtggaagctgttaccacccttgcctgaggaggcaggggagaaagctggggaagataacaagttggggagctgtagctatgggccctggtagagggatgccgccaactaccaagctgcagcctggctgggaaaggaaaaatgtcccgacctctttgtcctctcattccctgatcccctgctaccaccttgcagtaggccaaaaggaactgaatttgaagggcaaatggatgctgacttttccgggccacagagtagggtggagaaggggcagagtagggctgaatggcaaaagaagaatgcccagcacagctgttatgtctctgttatagttcctaacacagtacatgaaaattttttatgtacatatctttcccaccaggtgacaagtcccttgaatgcatgtttcatatttttctgaaccatggatgcctagtacaacctttacaggttgttaaaaataacttttttatttttaacctgtcgtagtctgttctggctgccataacaaagtaccataaactagttagcttataaacaacagaaatttttttctcacagttctgaaggctgggatgtctaagaccaaggtgccagcagatccagtgtttggcaaggacttgctttctggttcatgtatagtgtcttcttgctatgtcctcacatagcagaagggatgatgatgaatatttctggggcctctctttttttttttgagatggaatttagctcttgttgcccaggctggagtgcagtggcatgaacttggcttactgcaacctctgcctcccgggttcaagcagttcttctgcctcagcctcctgagtagctgggattacaggcatgtgccatcatgcccagctaattttgtatttttagtagagacagagtttctccatgttggtcaggctggtcacgaactcccgacttcaggtgatccccctgcctcggccttccaaagtgctgggattacaggcgtgagccaccacgctgggcctggggcctctctcataaggccactaatcccattcatgagggctccaccctcatgacctaatcacctcccaaagtccccacctcctaatacatcaccttaggggttaggatttcaaaatatgaatttgggaaaacgtaaagtccattgcagggcctgtttgtaatatttaagtgaaatattaagctgcattattgtctttttatttttaaacacttaaacaccattttctagagttgtcttaccatgtgaagcatatggggggttttgttttgtttcattttcctgacctgcattttctcatttctcagccaaacaggcaggactcgtgaaattgtgatgccttctaggaactacaccccatacacaagagtcctggagttaaccatgaagaaaactctgacttaggcactcagaggcatacactttttacagatggacaaaagctctggaaccctgtggcttcaaatcctttgggaagggtgactgttgtttcccctacacacagtgtaagccggaatgggaatcgctgaggctctgatccacttctaagacaggaaggaaagtgaaggcagagtgagcaggtaagagagggatatacaaggtcacatttcagacacccactcggcataccctgccgtactgcatcatcatttgttttctttgtagacactgaaatcctatcaggaggattccttcacaatgtattttatttgctagactttggttgggagggaaaaggacattaatttgaagtttcatgttattcatgccaggattgtttgatagagcatgaaggttttgtttacccataaaagtattagaggcagcgtttctctgatacagagaggcctgtccacaagaagcatgggcacccagccaaacttgaacctggaagggagggttcccggcctgcaggtgctctttcctcttggtcccaagcatctgtgcagggtcgtgggagccacactgagagacttgtgtgggccagacaagcttcattctgatgcgctagtcccttggtttaatttgtgccttatgctttcattggaccagctgaaatcactgtatttattcaactagtgatttttttttctttctcactttaacttaaagagaattttatatgtcttggaaatttaataatttagtgttctcagtatcaattggtgtttttgttaaacgaatgaatcatctgttcatgcatgctctactttgatattataacctatgtcacatgtgtttaataaataccatatattttgttctactaatgttgtctctctgtttcatccatgaccatgtagaaggggcagagagcagatcaggctctggaatgagtgtcaaagtcaaatcacatgatcttccagccagtacaattcatacaagcatctgtaaaccataagattgactgtgtgtgtcgggggagggtggggggcctatctgtctttttaattgctgaactttagttaatacaccatgtggaaaaagcaagataccttaatgatcacaaagtacaaaaatagattttacttttaaacctttcctcaaacctcccaccccttactgtctccacttccaaaaaaccaaagaaataaaaaagtaagaaagcaaagcaactcagttagataaatcactgtgagtcagaatcatgctaagaggaaaatgtgcatttgggagccacatttgtatttaaacactgtccgtgggaccttgggcgagtcgtcaaggctctctgaatattagtttcatcctttaaaaacctcggattatcacacctacttgataggctgacgtgagtgccacatgaggtcattcccacatagggagtgggcactgctaggcacacaggcagtgattgctgtcattctggaggttttagagcactgctgattgctggttgagtctcaccactggaggtattctagcagcaaaaaaccgtgttctgtggcagccaccaagaaggagcacttagagaaaaagctgtccttaggaccaggagatagggaagctggactcagagagaggcagagggttctgggagcccatccccctgaagaaactggtctggaagcagtttctaagtgaaatgcaatgacttaaaaaatgtcaattttaatgagaccaaggtagaaatgaaaactactctgccaatacttccacattcacttctttctctctctcttaaaacaagcaaggaaaagaaaaacttagtaattttaaatttaaaggataccagggaccattctgcagctcgggcctttgtattttaaaatatatcttcaacatatggaaaattctaaacatgatttgaactactcaagaagactattaaagagagttcctaaattgtacagactgaaaccgaaagaagctgagagataatccttccagatcctttgtcaacattgactctagtgccccccaaccctccatctaaaggactgacattcatcaacctcttcatgagcaggggtattacataaaattgggagaatgaactctaacatttcatagtaaatttatctcactgaaatggaaagcagcagtgtatgtaaagggtttttaaaaaataaaacaacatcctataatcttccaattaatatcttcattccagaccttccagaattttaaaacacacccgctccattttgtttttaaaataaatataaccctatactgagaagtggaatcatgtgatttttaagaacgtgggaacactcgagtcagctatctgagcttagtcactagtgcgcatgtgggtaagtcacaaccctgtctgagggcctgtaaaattggaactgtgagagttctttcctaatggggttggtgtgaagagtaaatgagttaatgcctgcatggttcttagaatagtgcttggcacatgataagcacttaatatatgctacctattaacattacatacttttgtagccactttttgcttactttatatatatataaatatatatatacacacactttatatagtttgctttatatatatactttatatatagtaagtttgcttactttatatatatacatataatatatatttttgcttattttatatgtatatatactttatatatgcatataatatatatgtatacaatatacataatatatattatacacatatatgtatacaatatacacatatattatacacatatatgtatacaatatacacatatatattatataatatatgtgtacaatatacacatatatattatatataatatatgtgtacaatatacacatatatattatatataatatatgtgtacaatatacacatatatattatatataatatgtgtgtacaatatacacatatatataatatgtgtgtacaatatacacatatatataatatgtgtgtacaatatacacatatatatgtgtgtacaatatacacatatatatgtgtgtacaatatacacatatatatgtgtgtacaatatacacatatatatgtgtgtacaatatacacatatatataatatgtgtgtacaatatacacatatatataatatgtgtgtacaatatacacatatataatatgtgtgtacaatatacacatatatataatatgtgtgtacaatatacacatatatataatatgtgtgtacaatatacacatatatataatatgtgtgtacaatatacacatatataatatgtgtgtacaatatacacatatataatatgtgtgtacaatatacacatatatataatatgtgtgtacaatatacacatatataatatgtgtgtacaatatacacatatataatatgtgtgtacaatatacacatatataatatgtgtgtacaatatacacatatataatatgtgtgtacaatatacacatatataatgtgtgtacaatatacacatatataaatgtgtgtacaatatacacatatataaatgtgtgtacaatatacacatatataatatgtgtgtacaatatacacatatatatgtgtgtacaatatacacatatatatgtgtgtacaatatacacatatatatgtgtgtacaatatacacatatatatgtgtgtacaatatacacatatatatgtgtgtacaatatacacatatatatgtgtgtacaatatacacatatatatgtgtgtacaatatacacatatattatgtgtgtacaatatacacatatattatgtgtgtacaatatacacatatataatatgtgtgtacaatatacacatatatataatatgtgtgtacaatatacacatatatataatatgtgtgtacaatatacacatataatataaaatatatgtgtgtacaatatacacatatatattatataaaatatatatgtgtacaatgtacacctatatactctatatgtgtacaatgtacacctatatactctatatgtgtacaatgtacacctatatactctatatgtgtacaatgtacacctatatatactctatatgtgtacaatgtgcacatatatactctatatgtgtacaatgtgcacatatatactctatatgtgtacaatgtgcacatatatactctatatgtgtacaatgtgcacatatatactctatagagtatatatatatactctatgtatattctatagaatatatatgtgtacaatgtacatatatattctatagaatatatgtgtagaatatacacatacattctatagaatatatgtgttcaatgtacacctacagaatatatgtgttcaatgtacacctacagaatatatgtgttcaatgtacacatacagaatatatgtgttcaatgtacacatacagaatatatgtgtacaatgtacacatacagaatatatgtgtacaatgtacacatacagaatatatgtgtacaatgtacacatatataatatatatgtgcacaatatacacatatataatatatgtgtacaatatacacatatatatgtataatatacacatatattatatataatatgtgtatattatacatatatgtgtatagtatacacatatatattatataatatgtgtatagtatacacatatatgtataatatacacatatatatgtataatatacacatatatatgtataatatacacatatgtattatatataatatgtgtatattatatacatgtatgttatatataatatgtgtatataattgtatataatggatataatatatactatatgtatataatataccaatagtgtatataatatatacgtatatatattatatatagtatataatatatacgtatatatattatatgcgtatatattatatacacctgtgtaatatatgcatatgttatatacgcatatgtaatatatgcatatattatatacgcgtatgtaatatatacatatatatacgtgtatataatatatcatattatatattgtatacgtacataatatatcatatataatatacgtatatatcatatataatatacatatatatatcatacattatataatatacgtatataatatatcatatattatataatataagtatatcgtatatcatatatcatatattatatatgtatataatatatcatacatgtatatattatatacgtatattatatatcatacatgtatatattatatacgtatatatcatatataatatatgatatatacgtatataatatatacatgtatgatatatgatatacgtatatcatatattatatattatatacgtatatcatatataatatatactatatcatatatatgatatagtatatattatataatatattatatataatatattcacatgcatatatatgtgtatatatataaagtatatatacatataaagtaagcaaaaagtatacatatgtattatatatagaaatatatacatatacataaagtaagcaaaaagtgtatatatactatatatataatctacaccattgcttcttataggtaattggattccattttttgatgtcccataatttatttgacccatcccttagtgttggaatcttggatgttgtcttcacttttcttcagcagtcctctgatgaaccatcttgtccacacgtttttgcacacttgactgattattttctcaggatcagttcctagaggaattgtctggtcaaaaggtgtgcacacttttggtgcctatggtccaatacggcctatggaaatttgaattcattgaaattctcactaacaggctgagaatgtgacttcctgactcttttgccaacatgaggaatgagaaacagagtgtacaacatggctttctttaggcagacctgccccccaaacaggtggtgaacaaagttccttcagcatattgcctgtggatatcagaactcagggacatgcaggtgtgagctgcgggcctggaggtgtccctagggcccagagagtgcctgggcagccgacgggaaactggatggactcagaaggagcaagtgtccctcaggatccaggaatcaaagaaggcctgccgcttagtgagccagcatcaagagcctgtcactcaggccacatgcctaagatgcggtttgactctgagtggggcatgccccctatttcagggatagcctgggagagaggatcaacatttgggaagtgcttggagggtgcaccaaccaaggctgacccctgagctggtccatgtgtccactgtgagcacccactttcttcccagtgaatgccatctgcctactccaggaactctagggtggtcaccagggcaaggagtgggggtgataggaatgggtcctggctcaagtcccactgggccatggtgctcttcttgacggccagactgagagggccagttcagttcacccagcacatgccaggtgcttggaagacaaagaaatgcacctcgagacccttgctgtctccaaaatcttttccagcaagtccaggccctcctgatctttcccatctctgaatcccaggggaacttattttcagccccttctttattcttacatctcatgaccaatctttgtgtacatttattatctctccagtgacataaactcctcaggggcagtgtcccataaggggcacactagtcatttggagggaagccattgtaaaccttgataagcatgaagaaatctacaaatgaggagtattccagaaaaagcctcggctttggggaagtaaataataccaggagttactgagctggacacagcacacatacactgagtctttacaacagtcctgcctggaagatgttatcaccaccatttcatggataaggaaattgaaactcaaaaagatgtgaaaattgtctgaaaccactcagacctgtctgatttcagaacacaggtgggaggcctggagtcagtcccaggtctgccattaaatcacaatacctccttggtcaggtcactacagcactctgcagctccgtgccccaggatgcagctttttcgatgaagtaaatggaattgcatcccccacccaggcttgctgcacagatcatggcatagcattgacaaatttcctagcagttcatcagagatatgccaataattgatacctgctactattactagtaattaccgggaagccagtattgcaccaagaatatttgcaaacccaaggatttcttcttattggacacagagattgaatgaatgctagcgaatggaattgtgcagaagacaaacaggagtgagggaaatgctactggataagcaggaggttaaataaactgtatctccttttgtttagatgtgaatttaagaataatctattttactttgtcagggaaggaaaggcctaaaagggagactaaagatgagttgctaaaaaagagagaacagaagcaaagagaccagaaggtgagtgctgctaaagcttggggtaattcgttaggcaggattagataactaatacatggtgtgaaaaatatcgttgcattttgtttttgcatgcaaatatctaattgttttagcactatttgttgaaaagactacccattttccactgaattgcccttgtaccattgttgaaaataaattggccatatatgcataaatctatttctatactctctatactgttatattgggatctagttgcttatcttgacactaatactatgctgtcttgtttgctgtagctttatcatcggccatgaagtcaggtagcacaggctctctaattatatttttctaagttgattgggctattctaggtcctttgcatttctatatgaattttacagtctgtcaatttccacaaaagcgctattgggattttccttgggactgcattgaatagacaggtcaccaaggataacatcaagaccttgctgtgtcaggccagctcctagcaacactgcagcccaagttgggagcactaggttggctcctggatgtcagtgactgctcttctcttccttagctggaaaggtactgggaaaaacctccatagtgtattttggtaaaggtatagtataatctttgtgggattccgaacaaaatattataagaaacattcatttgtgcccaagggccataaacttggtgtaatctgaatgcaataaattataaataaatggcaaacagttcttgatggttttctcttaatttttcaagttttaacatagagcgtttacaggattcaccttcctgatttagggatgggaggggggttgagaaataattagtaggcaattttttggccctgggacttttcttgtaaatgttttctttggcagccatactcttgagaacaggaagttactctcttgttacagatttaagacttttctgagccaaataacagaaagctggattagttctgaaatgaagtggggggaaaaaaaacaactctaggctcttgctggagattaatgacatcttacaaatattttaattctcccctttcctcttaacttgctacctcctaaacaaaacacactcagactgaaaaaaaaaaaaaaacaaaaaacttaactgatcactttgtagcccaaccttaaaataaaatatctttatggtgcccacaaatttatgtaaacatttttggggtgttaaagggaaggaaaatagggctgtcttaagtcgatcctttttttgttacaaaatccccaatatgaaatttagagcataaaatgtagttgtaaagatgctaatttttctatgataatcacacagattcataattttctttgatctttttaaaatggcttttaaaaatagataaaagtgtttaatcaagctttgaaaactatgcctatatgttgtttgagatggttgcaaacaattctttagaaattgttccaaatgacaggattatatcctttgactagagcatctctgactataaaacaaaggaattatttcctccaaaaagactgagtcctcacagaagggcatgctgaggtagaaataaaaaaaaattaaatttttacacttgattctaaaaaaaagttgtaatcttaatgaagttcataatctggaggaacattaattccgtgaattatctgagaactatttgtgaggattgtttttaaaattgctttaaatgtaaaagtttttattttttgcaaggattcttaaaacacagaaggccttataaaaactttgagattgagaagtaaagaacgctttcctgtaacaagtatatatcttctactagtaatctaggaagtttctatggtattaattgcagcctcagaaaataaaagagttggtctaagtgttttatttgcacttgcctcctgcacccaaattcaaatgccctggtacccaagaagtttgcctatagttgagaagggtaggataatagggccagtagctgatgggagcaggggaggatgcttccctgggctataagaacatgcctatcctaaagtcactcaaattcctaagtctgaaaaacactgtgctgccaaacacacccatctgtaatttgaatgtggccaaagacccacaatttgccacccttgacttgcattatctaatgtttttctttctgtatattatgaagaggatatttattccttcatactaactttcttcagtctgcttgaggtgatgcccttccacatcattcataatagtttcttgtcttctactattattgacaacttcacttttttaaccttataaacaattttaaattactcggagctgtcatccattagatataaaaattaaatggagcccaggaattctaggtgatgggaaacattatccagggctgtaagacatgcacaactatgggagtccagcaaaggctgataagcctggagctccagcaatgttgggtgagcatttatttaaagggagctacttgcttcctggtttgactgcataccaaatatatcttctcaacatttatgagcttaaatagatgcagatgttgccagagagtgtattgtaacattcatcatcctagaatcatataatttaagtgttgagaggcatcttggacttcggttcaatactctcattttaagcaggaggaagctgaggttcagaagagttaactgacttgccacaaagttagtggtccacaaaccctgccccataaaaacattgttgagggttgacaaattttactaccaccacctccgttctctcatctggattgctttaattgtcctatacactatgcttgactattatctcctcccaattttcaagaagaaaattaatgagaatttttttttcctgaataattcttctttatatttcgtgggcatcccttacttctctccatctccccactgttgatgattttcagagctgtgttctttctcatgtaagatggaaattaaaggtgaccagacactgattttggccaggtctagtgagaggagaggggttagtttgttttctctaactctagcctgctgctgatcactagtttatttatttcatggcctctgatggacatcagactccaaatagtgagagccatggtgtgctgacactgtagcagaaatcagttctttccatccactaaaaagacaactacctccttggtgaaacctgaaatgatcttatgaaatctcatcctgtagtgactttgcaaattacctcactcctccttttctgttttctcataaatatatgtgcagactgtctttcctcaaccacaaaggaagtgtaaacatagtttatctgatgttttatgaattaaataatttctatagccagacttatatgatgtacttgatgttttatgaaaaatcttcagtgaggcccatttaagtgtaggacagtctgccctccagcatagaatttgaaccaattctaagcaaagtttggctgttatatcctcctactttcctgccctacatactctccaaatcctagagatgagtactctggggtcttcctattatcctaaactcactgatgtaatagtctgtctggtgtgttcttcttctcagattactcaaaattctctccattttctccctttccctcctgaacaaatttcactctttgggtttaggtcatcatctcagctaggctgttatgaagaagcattttggaactaaataatactcacgtgtaaatgactaatagatcatttatgttctcaaaggaagatctttgttcaccatataatcttcttattggtggaatttcactcaatgtgtcaaagggaaggaaaataagtcaaggagaggggaaggtatttttaatcttgtttaagattttatgtcttaaactgagaggaggggccttagctacaatgtctatatagtctgtgtcaaagaccgtgtgctctttcaaggatttttttcccagtttgtgagttttttcatatttaaaaatcttacaaagttttattattcaatcacaattcagttggtcacatatctaaccagcaatcttcattaaatttattaaaaagtaaacttacatgaaatttcagagtaccaaacatttaataatttaaaaaactatgtcttcccacactatcaagatcataaaacacagtggtggcctgaaatgggacattcgtcactaaaaaacacttcagccatgtgacggtattaacagaaaagggttcttttccaccaacttgaacctcacttggctgagattttctcaccacagtctttgtatttttttttcccatgggcaactgcccccttgattaatcccatttcccttagtcctagtttttccaggcagctgagcaaacaaagatgcaggcagccattttaacgtgcttcctccctcaagccctctgggatgggccgtctgttcatcctgttcataaaccaacggcctgaatgggcttggagaaagcagcaaggatcttctgtcaggattaattttaataggccatagtctgtcacccgggaaccatagcccaggcaaatggctttaaattactatttgctgataaaaagggagatatgagctgaaaatttggttcctcatttaaaacaacttggataactaatgcaagaatttacttttagtgtggagtgcaggtactttacagcctaaacccttgggtagctgaggaaaatcttttgttgccatgggatcacagtgaaatataaagaggggaaatgtggcagtttgtagaagtatagaattttagagctggaagggaaataaaaaatgtatctgtgacttcctaaggacttacgtttagagctttatatttctgatttctgtgcagagaaacgcgattcctcttattgccccttctacttttttgtctccctctttaccaattcctttctctttcctttttttcactgtttttctcatacccaattccagttccttgttccttcccttggttcctcatccctcaccagccaggctcctgtcatttctctgtgaagctctgcactggggggcacatgaggtagcgtggtgaatgtagcccctaggcaaacaagtcaggaggccctagctcttgtctcttcccttgtaaagtgtgagaaggcagtttgggggactgactggaagggatggttttgtaaaatgacacactgatgtcagccattattgttcaataaagtcctctgtgtaccattcataagtaatttttttattagctatggccattgttttggtttgtttaaaaattcagaatgtggctgggcatggaggcttacatctgtcatctcagcactttgggaggccaagatgggaggatcatatgagcccaggagttccagaccagccctgggcaatatagccagaccccatctctccacacacacacacacacacacacacacacacacaaatcagctgggcatggtggtgcacaccagtagtcccagctacttgggaggttgaagcaggagtaacctttgagcccaggagtttgagactgcagtgagctatgattgtgccactgcacttcagcctgggtgacagagggagactctttctcaaaaaagagaaaaaaatcagtgtgttccatactcaaatggatgcttccaagaaaaatcatggaagaaaatagaatttgcttcatacttctttatgacccttggttcccatctcttcctttccagccagctcccctcaactctcatagatcatatcacttgttcatggagaaaatgttctccacattcctttacaaacatgactgataccataaaaaatgtttggtgcaagttctgtaatctttcttaaatagcccagcctgggcacttgagcaagaaggctggtggctaaaattaaacaaaacataacaaaaccaaaaacaggctgggcgcgatggctcacgcctgtaatcccagcactctgggaggatgaggcgggcagatcccttgaggccaggagtttaagaccagcctggccaacatggcaaaaacctgtctctactaaaaatacaaaagattagccaggggtggtggtgcgcgcctatagtcctagctactcgggaggctgaggcaggagaatcgcttaaacccgggaagtggaggttgcagtgagccaagatcatgccactgcactccagactgggtgacagagcaagactacatctcgaaagaaaaaaaaatgcaaagaacaaaaacaaaacccaagtgtcaatgaagatgttgagcaacttcattgctgatagagtgcaaaatggtatagatactttgtaaacaatttggtagattcttagaaacattcatttaccctatgacctagttatcccactcccaagtgaaatggaagcttatgttcatgcaaaaacctatacacaaggtttatagtgacttgattcataatcagcaataacttaaagcaaataaatacctttcaactgtttaatgtataagtaaactcctacaatggactactatacccatagaatacaacactacttagcaataaaaaggatcaggttactgatacctgcagtggcataaatgaatctcaaaaccattatgctaagagaaagaaggcagattcaaaaggctactgtatgattctacttatatgacattctggaaaaggcaaaactctaggacagaagacaaaccagtagttgccagggataggggttcagtggagaggctgactacattttggggggcatgatagaactgttctatatcatgattatggtggtcatcacaaaactgtatgcatttgtcaaaactcagacctgtacactaaaaagggggaattttactacatgtaaactatatcaataaatctgacaaagaaaagaaatatacagtattaatttgcatgttattcattttaaaataaatggtattgttctgcaacttgcttttttcacttaaccttaagttttggagattaaaccttgttgaaatctgtagatttagttccttcattttaattgacgtagttttcaatttttgctaccactataaacaatgtggcaatgaatgttctgacacacgtcttctttagtacatacaccgagtttccttaggaaggctagtacataaatgctgtgtgttggattgcagagtaggcacgtcttccagtttactagatgtgactgcatatctttcctaagtgtttctgccagttcagtctctgtaacacatgagctcctgtttctccaatcagaaagagtttggaatttttaagatttttttactttgcatttccctgaagttgaggatccttttttaaagcatgttttctggtttttccagtttcctcttctgtgaactgttcgtatttttcctttttttttttctgacttgttttgcttattgatgtataagaattctttttgtaaagtgtgagtttttgtattctggatgccagcttgctgtttatatgtataatagcctttacccttctacactacagaagtttttgccttaatgtagttaatttacaaattatttcctgtaaagtttgtaaaatgtgtcttaagaaatccttcctaaacttgtgatcattgaaatgtttttctgtaaatattatttttcaattttaaatagtagtttgttaattcctctggaattaatcctcatgtctattggaagtaggaaactatttatattaatactttttcccatatacacaaccaatctctctagcactatttatgaaaattcactctttcctcactaatcttaaatctcaaatcaagttcccatatatgcatgggtctatttcggtgttctctattttgttccattggtctatttgctgcaacaattatataaaattaataaaatgtaattaaaaggccaggcacacagtagggccaaagcaaaagctagcttcccccactcctcagtcagctctctaaccctaaagtctggtcatcagtgaagtcttggtttttctaaaagaatgatgctgtttggctcccttgttggtgatctttattcccactgacttcatctggtccaaatctctggccagcctctcctttaaattcccttttggtactagctccccactaatcatcaatctgctgcctgcatacccccaacttggcccagtgtcactatggccaagtctaggcatagaggctggacatgcttctgcattgccccataacacccccaccccctcattctccagcaatccccatgtggcggtcgggccatttctcatgctgagaggcccaacaagtgtgaagttgaacactttcagtctttgtacattgacactaatgtatcccacattagtaatccaagtgaaggaagcaaaattaaatttcttaaagaaaaaaaggctgggtgtggtggctcatgcctgtaatctcagcagtttgggaggctgaggcgggcagatcgcttgaacctaggagttcaagtctagcatcggcaacatggcaaaaccctgtccctacaaaaaaattaaaaaaaaatttagcggggcgtgggacacacacctgtagtcccagctacgtgggagggaggctgaggtgggaggattgtttgagccaagaaggctgaggttacagtgtgccgacattataccactgcactccagcctgtgcaacagagcaagacccgtctcaaaaaagaaaaaaaaggtcagaatttaagagaggaagagagggtcgaaggagggaaatacaaattcagttttggacaggttgagactgagaaacctttgagacattcaggtggtaaggcctttaccctgactctaattctagtcccagagcaaaaccccaaaagactcctgtgcttaaaagcctggagagattggtaccttggaatttatggtaagagagagttttaagagggagaaactgctcaacagggtcagatgctgtgagaaggggaaggactaagacatattccttgaatctgacagccatgaagggatccatggtgcttgcaagatggtgaagaaatggagtcagagaatgtggacaattcttttaggacgcgtatctctgaaaaaagaaggcaggtggaagctgggggcagcttttaactgctttattggggtataactgacgtgctatacactggacatatttaaagtatacagcgcaataagttttttttaattttctctttttatctctagaagtaagttttgacttatcaaatgattacacccatataaccatcaccgcaattaaggtattgagcatccccgtcactcccaaatgtttcctcctgcccctttgtcatccttcctcccagcctctccctgacaccccacaacatccgataatcactgatctgctttctatcactatagatgcgttcgtattttttacaattttatataaatggagtcatacggtgtgtaattttttcctggcctctttctcagtatactcgagattcatcagagttgttgcatgtaccagagtattcgatcatatgcacagactacaacgtgtttatccacttacctactaatggattgtgtcaagttttgggctattacaaataaagctgcaatgacacttatgtgcaagcctttctattaatatatgctttcatttacctgtttctcttaggtaaatacctagcagaagaatggctgggtcaaacggtatattttaagaaactgccaaactggtttccaaagaggttgtactattttgcattcccattagcagtgtatcaaagttccagttgctctacatcctttacaacacttggaatggtcagtctttctggtaggcatgtactaatatctcattgtgattttattatttattttttcttggatatagagtcttgctatggtgcccaggctggtcttgaacttctgggctgaagcaatccttccacctcagcctcctgagtagatgagattacaggcatgagccaccatgcccagcttctccatgtatttttaatttgcattttcctaatggctaataacactggtcttctttcatgtgcttatttttcacttatatatcttctttggtaaactgtcttttcaaatcttttattccctaatctggaaagtggtgcccatcacttctaccatatttattagaagtgagtcagttaagtccagtcaacattccatgggagaggattacattggagtgggacactgggggccatcctagaggctgtctaccacgtgtggcttcccatttcttttagggtaaaatccaaactccatatcctggtctacaaagccctgctagatctagccccagccttccacattgcttttttttgttatttgaacatgctaagctccttctccttttacggccttagtatcttctcttgcctctacttgggatgtttttccatcagattttcccacagttgatcatttgtcatttgaagtcccagcttaaaagttacctcctcagaaaacccaacctcagtcacccaatcaaagtagtctaccagtcactccttatcaaatcactctgtactaattctctatgtgactcttagtactgatagaataaaagtttcaatgtaacaggaaatttctttacctcattcatcgttatatcaccaaatcctagaatagcgtttcacttgtgatagacgctcaataaatatttacttactgaacaaatgaatgagatctccaaagaagcaagaacagatgggatccatagtatagctgaagggattaaccttggataaagttcctgtgactactgctgtttaataaacgaccccaaatttagaaaaggcatagtgaagatgtctctgctccacaatgtctgaggcttcaatttggatgtcgtgaaggctggaagtgactggacagttggggctgaaattatccaaagttttgctcactcacatgtctggtggttgatgctacctgttggctgaaacttcagcttgggatgatagccaaaacatctacgcaaatgcagacttcttcatggcttgcttgctgagttccaagagtaagcacttcaagaaagctaggtagaagttgcatcaccttttgtcatctagactagaaaaatcacttttgctctagttataagcacgcccagattcaaggatagagaagaataaccccatttcttgacaggaggagtgttaaactcacatagcaagaagaacacatttaggatgggaaatattgttgctgccattctggtcaactccaactatatcatggccagttttgtggccattcatgccccaacaatgacaatcaaagcaagaaaacagaggagaacagcctggaaattctaaacatttatgtttatcagttttacaattgattgtcagtttttatcttcaactaggtaaggacaagtggaaatcattcccaggtcttgtttttgttcagtgtccttgtgtagcttcgtggcagtgggatgtctataggtcatcttggcagcacctcacgtgactaatgaaattttcctttcccttaattctgttttgaattttccttcctttcaaacgcagccaaatttattagtttactctgagagcaacattcaggagattaatccaagtaccactggaaaagtgattcatctttttaatgagcactgaaaaacacaaacaaaaaaaccccaaaacacttgcccagattcatttttataacggatgggctctttgacaggcaactggaattctttagcagagattagctgtctgtggtttgtgggctccatttcctttcaagtgtttggttcagctgcaaacaggtataacctgtagcactcattgtttctctctttagtcttcatttctccattgttaaatttctccattttatatcttcttctctagacactgctgtgaaaatttgtgtcctagatatttattttttgtttcataaattataaaagaatactttgcctattttccttttgaagtgtaaataggctgcaagtagtctgcttctgttgtagagtgatgttttccacttgccatgcttcctggttactgacaaaattagacagtttgtgcttggatgctggtgggaatttagatctgtattatgatatcttgaagccctaagccatactgtataaaagattctatcccaaaccactgaaaaatctacacagtaatgatgattaattatataaaaagcttaagatttgcatataagaaacatttcattaagagaaagaggaatatgggggaaaggtagagaaaaaaatatgagagaaggagattgtgtcaattactacatgctatgttcctgagaggagacagaaaaagtacaattatagctccctcacagaaaggactttacaattttgttaggaaaggaaaaagaaatctcgatgcataacacaattagagaagtataatatgcttcatgcagtgaggttccaactttaactaagccctataattgtgctgaaaagaaagagaagtttggtttggaataacatgggaaggttcagggaggaggtgagacttcagccaagacttacaattggcaaggggagaagagatagccttccacaaaagggtaacagaagggggcaaaattctgaggcctaaaagaaaggcatccttgccttggggacacctgtggcctacaatcagcacatggggagttcactactgtgggagaaataaaggcctccagctggggtccaggggtggggtgagggaggcttgcggggtgcttatcactgtaaaccaaaaataaaatttgaaggtccgccctcaaccgtctgaatggacttcctcctgtagtccagggtcctccaaatttaacctaaaagactggcttaggccatgatgggaagctgaggtcagacatgcctcattatgcccttctttcttttagaatccaggaaaagctacacagcatttaatatcaacacatataccttgagtctgataagaaacacaacttactttctctgaagcctgctaactggaggcttcatctgcatgataaaatttcggtctccacaagttcttatgctaacctagacattcctttaaatcaattaccaatcagaaaaaaacttaaatttacctataacttgggagcccatcttgccccacacccgctctgctttgagttgtcccacctttgtggattaagccaatgtttatcttaaatgtatttgattgatgtctcatgtctccctaaaatgtataaaaccaagctgtgcaccaaccaccttaggcacgtgttctcaggatctcctgagggctgtgtcacgggccatggtcactcatatttggcacagaatacatctcttcaacattttacggagtcttttttttttttttttgtcagtaccacagacaaccacctgactcgaggaccttacctatttctcattcagccaatgctgcagcacgttattaacgtccttgaaagcaagtcttatacagagaaaacttattttgatatattaatgaatctgatcagaatggaccagattggggggatagataaatggttgcaattgtgctccctggaatagctttggagtttacctagatcttctgtctctttaggacagagctgcttgtgtttatatagcatcttacacaggattgagacaacttcaatttcctatatcaaaaaatcgggggagggcggtgggttatgggggtgttcaaacctcccaagtgacatctgctgtgactgcatgtcttcctactctttccactgggatgcacctctggtagctgaactataacgagaaggtaaaagctgtgtccaatacctattaagctgccttcttctcaacagctggggaggtggcgggggtgggggggggcggagggaagtcttttcaacagttttacacatttggaaataggcctaaagtgaagaaggggattttcaaattggtgtgttggaaaaggggctgggcttttgagtttgaaatctggtgctgtcacttactggttttgtgccctgggaatatttatttcagttttcatgcctctgtttttctataggcaaagtagaaaattcgaaaaggtcctcaacgagtttgtacagctgctcccactccctcatcacctcttgtgggcctttggaaatgtatgttggaggagacattttggattgttgcaatgacttgggagtgccatagcacctagcaggcagaagccagaaacaccaaatgtcttaacaatgcttgaggcggtgctacaaatgaagtccttctccaaatgcattgagccccaagaaaaatcgctgattctgaggaaccttccaactttaacaatttcaggacgtccctaagctgagctaggaggcaccacgcacaggccggaggcaccacgcacaggccagagtctcccaaatcctgtcccgcactctctcccaccttattaatggccagctcatctttcaagtttcgacttgaaccacttctcagagatatcttcccaggtgcccatcccaacgttactattatatcataatttgattctccctccccccatccccccgccaactctgtaaaccccaagtataacacaggacgttgctatttgttgactgacacatagtgcttggtgaggtcacgctggcgctgaatactttttgtataaaccgacgaacagctgatgaccgcatgaatgctcacacaaggggaaagggcgccaagccaaggagccggcgtcatccgacgtaacttccgccctttaacgctcctgcggacgcccccttctcccagtccgtgtttgtttccggaatttcaataaagctcgattcggctcgaagaagaccccgttcttccgggaaaatggcgactcccgctcgtgccccggagtcaccgccgtccgcggatccggcgctagtagcggggcctgccgaggaagccgagtgcccgccgccgcgccagcctcagcccgcgcagaatgtgctcgctgccccgcggcttcgagccccaagctcccgaggacttggcgcagcggagtttggtggagctgcgggaaatgttgaagcgccaggagagacttttgcgcaacgagtaagctggggtcccgcggagtctccgccaggctccttcagctcgagctccctgggcgctcccctcccctcccgcactctgttcccttccctggaaggtgactttgactcagtcacattcgcttcagtcctacgggcgagtggacggagggcttgctgcggcagagccgtgcctcttcctggccaggcacgtatgcctgcgaggatagctcggattgaacggctacctggcgttgcagggagttagtagcccctggtcggttttatttacccggggactgtggtggttccatgagtctgctttctaaacccttttgtcgcccgcacccctaacccataacagattgtcagcttcatctctggattctaagcttacaggaaccgtaggaaatgggaagagtgggatatgaagaggggtttattaggccgggaaagttcgaccctcattcagctggctggttgaacggattttagcaagggagccacgtaataaaagtgattttgttttttaggcagctttgttcagcagcttgttgcaaaagatggtttgaaggaataaaaagcagaagacagtagaaggatattttcagagagacttcccacgagacacttgtaagaaagtgagctaggaagggattgggagaacttttaagcatggactaatttaaatgcagttgacagagatggctgaagtttccaatctatatggaagaccactagcaaaaataggaaaattcagggagaggaatagatccaaggttgattttacttagggtgtgcagagttgagaggagagcaggacagacatttggttaatcgaaaaccaaacacttaaaagctggagaagtagtcatgaggctcaagaaagagagaaccctggaaaaatacagaaaacaggaatttcagctgtagagtgttgttaatagttgaaattgtggggatgaatgtagtgtcaaaaagaacagaggacttaaggtgtaattttttctttccatttattgtatagttaaagaaaagggaatcagaaaaggaactctgtcatccagcaaaagggacaaataaataattggttgggatcaagacatgtgttttgaccttgtgagaataggttttgaatgtatagcagtgaattaactttttggtctcaggactccgttatactttaagaattattgacatcccaaagagctattttatgtgttgtatctagcgaaatgtatttacttatcagaaatacgtctgaagtctttaaaacataagcatacacaagcacacattctattctagaacaatgatgtcatcacatgccatgtagcctctggaaaactccactgtacccatgcgagaaaatgagagggaaataatatcttagtattattatgaaagtagttttgacctaataggcccatccccacactccaccccatccccaaattttggagattgcactttaatgactgctggttcttggaatgtcttatgtgattattatatgcttaaaatacttttgctgaaattctaatttgctgagacaaatgaggcatatattccctattcttcctgcattcccttgttttttgggctatttggataatgaccattttaattgttttattcttgttttggggcagttagaaatcagatatttgacttaaaaatcagcttttctttctttgaagataatgccttgcctttttaatgttatatctcaagttaaaaaaatggctgtaatgtaatagtattcttttccatttgacagaaaattcatttgcaaattgcccgacaaaggtaaaaagatctttgactcttttgccaaactgaaagctgccattgcagaatgtgaagaagttagaagaaaaagtgaactgtttaaccctgttagtttagactgtaagctaaggcaaaaagcaattgcagaagttgatgtgggtacagataaggcccagaattctgacccgatacttgatacttcatcactagttcctggatgttcctctgtagataacatcaagtcatctcaaacctcacaaaaccagggacttggacgtcctactcttgaaggtgatgaagagacttcagaggttgagtacacagtgaataagggcccagcttccagcaatagagacagggtaccaccttcatctgaagctagtgagcatcacccgcggcatcgtgtttcaagtcaagcggaagatacttccagcagctttgacaacctgtttattgacaggttacagaggatcaccattgcggaccaaggtgaacaacagtcagaagaaaacgcaagtactaagaacttgacaggcctttccagtgggactgagaagaaacctcattacatggaagtgctagaaatgcgagccaaaaacccagtgccccagctgcgtaaatttaaaaccaatgtgtaagtaccctcggaaacaggcctgtaacaggaacgtgatatttgttaaactcaaaaatttacgagaaactgggtgtggtggtgcttgcctgtagtcccaggctactcaggaggctgaggtgggaagacagctttgagtccaggagttgtagaccagcttgggcaatataataagaccttttctcttaaataagtcaggagaatgctctaagttccgtgggctttgtatgagaactacttgtagttaggaaataacatgttgtggcaacactgagaccagcctggccggagtagaagattcatgttgaaaaatatttagttttgaaaccaaataatcgacaaggtcttttaaagcacatgggggagtgttaaattttaggatgcttagccagtatttcataataaacacagagttggagagaatttattatgacttctttttttcagaaccattttttagtgtacagctttgattagtgtactatcaaagtgtactctctttgattagtctgtgaactaagggtaaagcaattgcaggagctgatgggctttccagcagaaattatttgcatgctcactgtatgtaagcaagcagcaggtgttgtggggacacaattaagtcaagattcttaaaactcctttgccttttttgatgttaaatctcaagtttaaaaacatggctgtaatgtatacatgtgtaatgtaatacaataccatgttcttcaaggagtttaagagctacatgaggacccaaggtttacacacttggaaaagagttaagctacataataataacagtttcagggggaaggaagctgagaagaggtttgaaaaactgtgaaaatagattcaggcaggataggcaaaaactctgcttatcagttccttgccataaatttgtttctgaaatttcaggaaaagtaaaatctttttgaaaataattgctatttacttgcagcaaatgtaacattcaactcaggtaactggtaccttcttcctatattgtatttacaagtatgtaacatcaaagttaaatcactactacctttctttgaaaaacagaaaacctctagtgaaaagtatctaaaacatgcttcttttttgttagactttaattctaccccagcattcattttaacctcaaaacattttatttctgctgtatagaaaatcaggattatactacattaacgtgatcaagtactctcttgtgtacagtggggtatctttcttcacttccaggatgacattttagaaaactagaaccatcatctagtcaataaataaaacaaagaatacattaatcccagttctgtattatggtcatttagctgggagtgggagagaggtaagggaatagtgaagagggctaccaagaattcaggaagtttaagagacagggagcctcctgtataagttagaggagaacaggaaaggcagggctttgaggagtccttaggccatagacaggtagggattgagagggttccgtgtgagaggtggcttggaggttggaaggtggggtcaggtagtgtcctttgggtcctttctgctcttccttctgcatactcttctggcttcatgtatcacctggatgctggaggctgacccctgtgcacctctatcccagatcttcccagaactttaggtttgcatagccaattaaccatgaaacttgatcacttgggtgttcccaggtacctcagcttaatgatgtacaaagtggaactgcagtttctttccaaggtgatttccatattccctaatagtgccaccaccttctcggttttcttcccctaaggtatcttcgatttttctcatctccatatctgctagccatgaagacctacttatttctttgatcttcatctctataattgttcttcatcttctgtcgaagtgaagactctcatctctctcgggctgtaattgtggccccttctacctctagtcttaactaccagtctatctccactgctgccagagtgaaatttgtaagatggaaatccgaacttgttacggagaactcttcattgcagtctgggcctaggctacttcccagccctctttctcgctgtcttttctgtgtagccagaaaagctgagtctgtctaccttctgtactttctctcactccccttgctgggatgcacttctctccttatttacatgggtaagcagttattattccaagactgttcaaagcttttttgaaacttttcttagcctccctgtctcccactagaactggccatttccttatgttccaatgtatcttgttgagatatctatcacagtatctctggtattgtattgcactgaaactttacatgtgtatttctttctactgggcaataagcccttttgcaaatgttctttgaataaatgaaaaaaaaaaaaaaaactccagatgaaatacaaggtttgaataaggaaggaaaaggcaaagagcctgtatgcacacaaacacacccctatttgttagagcaatgaatactggtaaattacttactgttacctttggaggagaattaattgctaaggtaaaggccatttgtgtgaatgttttaaatgtgtctacaaataaaataatctgattgtataacacaagttttcctttcatcaggttaccttttcgacaaaatgattcatctagtcattgccagaagagtgggtctcctatttcctcagaagagcggcggcgcagggataagcagcatcttgatgacatcacagcagctcggcttctaccacttcaccatatgcccacgcagctgctctccatagaagaatccttggcacttcagaaacagcagaaacagaattatgaggtatttagagtattttttttcttgtctgtttgttgggtgctgcttacataagctagaatttactccaggttcaaggaggaaggaatggaatagaggggattaggtgcttccatgagctcagatctatgccactagttttcagagagtcacaaagttgctagaactgcaggaagtagctagagatgatcacagctaccttcaacattaaagtggtgatttgcctggagatgtggggagacttgtagaatttcatgtcttaaagctcatttacctgcctgttcctgttaggatagtagtagcatcgcatctctccctttcaccttgtaaaactcatgtgacagcttctcagtggcggactcaaacccagaccccttgttagagaatgaggagaatgtagttcccaggcttccatcttctgcagtacaggggagggcatagaaggagtgggaggataatgttgtgtagccagcagacagtgagacactgctttagagcataatctgcaggcccatgtgaagagagaaatatctcctgcttttggcagcttaatcaattttgcatagcactttgtttccatgtgttttgcattgaacttcaaacatgtatgttgagagtttgtatacagaataatgggatgggagaaaataagtgtgaaggaccataggggaacagaaaagtttagaagtatttagtaataattttagcctccaggagaacagtatcctgtctcacttcctaggtattgattagctagattttagtcaggtactagtgcaccaactagtataacaccagactgttcaggagttcgagaccagcgtgggcaacatagctagactccatctttaccaaaaaattagccgggcattggggcatgcaactgtggttccagctacctgtggggctgaggtaggaggattgcttgagctcaggaggtcgaggctgcagtgagccgcagtcacaccactgcactctgtatagcctgggtgacagagtgagaccctgtctcaaaaaaaaaaacaacaaaacaggctgttaatctgctttggcttttcataaaagccttggcatggattggcattatcaaggtgctctttttgaaaaaaaccatttttctttcagtgcattaaaatgactgtctagttatggctgtagcattgaggaagtgtttactgtctctgagctcttaaatgcctgtcctaagatatttttaggttgaattaaacccttcatctttaaattgtttttttttagcagagaagttgtagtggtaatagctcccacttttactgacccatattcatggcttgaagaggaggacatcaagaagttcaagaaagcatgagaaaagggaagaactgaattaggaatgacattgccacctaccatcagttggtggtaaagtccttgggagtttttaagtacattgccagtgtctgaaatttacttggactttttattggatactagttgctgtaggactttatttggagaggaatagtcagctttttagtattaatttcttgattttcattttgccattgaaatgtaattcccaagtctggaagtcatgattgtaattagggaagaaggtcctgtcagttgtagaaatctagacagcattagtccttctttttttttttttttttttttttttttttttttttttttgagacggagtcttgttctgtcacccaggctggagttcagtggcgcagtctcagctcactgcaagctccgcctcccgggttcacgccattcttgttcattcttgtgaacccgggaacacgccgggttcacaggcacccgccaccacgcccggctaattttttgtatatttagtagagacggggattcatcgtgttagccaggatggtctcgatctcctgacctcgtgatccgcctgcctcagcttcccaaagtgctgggattacaggcgtgagccactgcaccgggccccagcattagtcatttttgacatttgataggtcaaattgttatgtgagtgtgtatacatgtgcatgtgcccccatatttaacgcatctgtatttataagtattgtagtgctaagctcattactcagtttcttatatagaggagtgtatttcagtgcaatgttgtatattaatggaggtcagtaacttcaactgtagcaggctggtggctgtcagaagcattacccagttgtgtctgatagggcacagccatcaggcttgtattgcccaagggagcactcagtgaggtgtcagtgtccctcttattgctgattctaggtaacttcccattgaaaaattgtaaggaagagatgtgaacgtgtaactttgtgctttgctctttgttttaaaggagatgcaagcaaagctcgcagcgcaaaaattagctgaaagactgaatattaaaatgcggagttataatccagaaggggagtcttcagggagataccgagaagtaagggatgaagatgacgattggtcctctgatgaattctgaagataatctcctaaatcactgacgttgagatgtcatcatcttacatcagactttctaactagtatcaagatcagtgtcagatattgttgagggaagtaattttataaagttacacaaaggtagttataaaaaaagcccagtttgtctttcagaaggtgactttcatgtgcttgaaaagtttaatatttgaatattgtgtttaaccacatggtattaaaattttgcaatatattgtgtattggtctgatattttagtatatagtagaacatactttttttttctttaagccaaatgaaaagaggtaactttgcttttttcctttttcttacctatcaaatagcatttattacatgtctttcagtgaaatacttagttgttccaggcacctaaaatcaattaggaagacatagttcccttcttttttgggtaatgaagggagcagtctaaagaattgtatgcatgtttgcatggggttattgagacattggatgtgaaatacctaggaagacatgtatggagaatgcttaacaaatgctcttctcctttttctgtcttcccttaggaagaacgttatctctcttctgattaggaaggacttcccttttgagtagatgctggaaagtggaggttttttttgttggtttgtttgtttggttttgtgtttttttttgagatggggtcttgctctgtcgcccaggctggagtgcagtggcaggatctcggctcactgcaatctaggtggaggtctttttaaataacctcatgttacttcaggcaaatctggtacaggagaagcccaagctaactgagctgggtgaaggcttgtgcatcacctggcttgagttccttgctgtcacagatgataggttcatgtacacaacattaatgtttgataaggaaagcattttttttttgttaaaattgaattgtcagtactttacttttttccccccaaataggtatatatagactgcagaagcttcagtcccatatataaacgttcatgtcattttagaggattatatggttgtctccagagaaattaacttacattatcaaaaaattctttgtctaatatattggagtctttaaaagtgttgaagaataaaatattaattagaacaacttcaaatgctaaggtgatgttttaccgggacttaattaaatacaactttttcctttcgaaaaagactgttcacatttgcttccaggtgtaattattgctttcattccttacccccctcaagcaaatgtgaaaagtatactgacctaagattctcattagttttagttcttaaaacgaatagtaaatgatttcacagcgtaaaatttgatgttatttctggaagctggatgatatggaagagttcatgtgcctggacacacagttccctgtaatcctgccatctagggagataaactctgttaacattttgatgttgtgtttttgcttatttttctatgcatagttatgcatttatattctcaaaaatgaaatcataatgtacattgctttgtagtctgctctatatattgtcaatatgttcccatattaaatattttgctttttagacagctgtaggatattttatttcatgggtataccataactttaagatttatttcctattcagcaatttgattatgtattataatgtaatctgtaaatagtgatatgattaacatcttaatcacatccatagaaaatgacttatttccagaagataccgctctaaaaatgaaattgttaggtgaaagtgtttttgagaatttttatatatattactcactgcagagatcatgttcatttacattcccattagcaatatatccaatgctcagaattgaaaattactacttaaaatctttgcaaattgaataattacagaaaagggctacatttaaaatttgtatttgtttttcttacttagtgaaggttgtgttttttttcatattcattggccatgctatattcattcttttgagaattgctcattcatattttttctgttgcttgcttggagaatttgctctttttttggcatataagttcttaagaatgtccgtcctttgtcatatattgtaactttttttagccttatttgtcatttaacatagtttgtggtatttcagtatagaagttgttttctttaggagtctacctttgtgtatgtgcttgaaagtatttttgtaatccaagaatggataaatgtccttattttcttctagtattttcttatttcacttttacacctatctttaaaaggaatttaaattttgtttatatacattaactaaatcagtacaagtttggggtgaaaaggaaatttttaatccatctcaaatgtatttggttatattatataaggtagggatttgattttatttcgaagaatttaccaattggttcagtatgtgaaaccaccatttcccctctgattagtaatgctatttttatagaatattaaattcttatgtgtcttttgtgtcttaggccaatttctgggccttctgggttttttctacactgtcaataattatcgctttaattggtgttaatatttggtagtacacaggttctcccttgttcttttaaattttgtgaaatataacttacaaataagtacttaaaacagagcttaatgggtaaagcaacagctgtgtaatcacaaactagatgcagaggaggtcttgccagcactccaaaatctctgtgtgtcccctcttgacactcactgtttcccccagagctaactatcctgacgtatggtaattctccctctgtccttttaagaattattttaccagttatgtgtataacaatatggtttacattttgctcacttttgacttatataaaaatagaataatact

SEQ ID NO: 71 - DNA, 125639 bp, Homo sapiens
  allele (1)..(125639): GRINL1A Variant Allele (rs6493943)
gctgaggctgcaagtagccggcgccgtcccgcgtcgcccccgcgcagggcgggccccgcacgcttattctgcccgggaggaacgccggcgtccagcccgctaccgaccgccgctgcgggatgctgcgctccacgtccacggtcaccctgctctcgggcggcgccgccaggacgcccggggcgcccagcaggagggtgagtagcgggggcgggagccgccgccgtcccgttcccccatcccggccgccccctctagaggggactagggatgggaaagctcgggagccagcacctggccccgacgccccaccctgggctcaactccccggtcctgtgccggctctggcagtgaccctcccgcttgaggtttcagggggcccaccagctggtaggagagggcttaggggactttatggaattcccagagatttcctctccttcctgcctttctgtcaagccgagtttattggcggcaccagtttaaaaatgaaggaagacatttgtgcagtgtccctaccttgagactcaaaagtaatgaatgtatttaaaactcaaactttccttcttccattaattaaaagaaagatggggtcacttgtgtccactagtgatagggtatccactagtgatagggtaattctggagtggggttagccaaggtgggcaaaccagaacagcagccggccgcccaggagcccgactgtgtgggactccggtttatgtaaaccactttcttctgtctgatttaaatattagcacagtgacaacaatggcagcactgaaagcttgggacagcatctccagggaaggtttccctttggaagtgctgtttctttttgatctttgtggcatcttttcccatctctccagatgctctgtaaaagaaatgctccatctttctaacacggtcagcaccttagagccacagccaggggcttggcttgtggctttttagttcttccatttatcatgatgttcaatacttatcatttggtacctctttgctctgattgagacttctgtaatcgtgtttcctcaagatttaaacaggtggttaagtccaaagcaaaacccccactggttctgtctgcgtgcaggcttggacctgcttatttgcttttacatgccttaagcgagtgatggtggtcaccttataagctgtctttcttagctctagaagaaaggtgtgttactcttgggcatgggccaactgatggattctggggtgtgtgtgtgcgtgcactcaccagacacttaggttgtgtacacaggcgcacacacacacacacacacacacacaccccagaatccatcagttggctcatgcccaaggttgacagaactccagttgtccaatcattagcatcatagagtaagatctacattgggtccaagggggtttccaaccacagtcctggccttactctaagttgggtgtttgtatttttctatggaaatctttctcaatttgaacacaattgcaactgagaaagaatgaagtcactgaaaagctaaccctgagccctgagaggatcatatgtgtgaccagactgcatgaattgcatgaaattctctgtaacttcccttccagaggtggggattagttggggtacctaacctaatacggtgggttgatacaaatgtgactagtatacaaataacatttctgaagattttgggtcaaacgtttcctttggaatatttatttaattataggtgctttgctgtcggacacattgtgacactcttgaaaagactttgccttttgaataagatggcagacgtattttggactggagaactcagggctcgggatcaggccattcagggctgtcctgggtacactggtacttgtttctggaaggaaggtatctaaagggtctagggttctgcccatctttatggtttctagctctgctcatgatttgcagatgttacaagtactatctgtgtgtgtgctggggattgtgtgtgtggtgggaagctgtgagatgttgattaattgatttattgaacattcataaacctttctctgtgtggtaaagggctggcattggggtccgccctacctgtagaggcagacattttcccaaactaacatcaaacaaagtggtgatggttatagtggggtgaagagtttacaaagttctgtagaagctaaaataaaggttcttcctgaggcatcaggggaaggcctctcactaaaggtatgtttttttgagatggagtctcactttgtcatccaggctggagtgccatggcacgatctcggctcactgcagcctccacctcccaggttcaagcagtcctcctgcctcagccttccgagtagctgggactacaggcgcacaccaccatgcttggctaatttttgtatttttagtggagacagggttttgtcatcttggccagcctggtcttgaactcctgacctcaagtgatacaactgcctcggcctcccaaagtgctgggattataggcatgagccacccagccccgcctactggtgatgtttgagtttaatcttgcaggatgagtagaatttgtaggggaattgacattattgggatactgaaaggaggaaataaccatctcaatggaatacttggcatatataatcatgtactgcataaccacattttggtcaacagtagccaggatatatgacggtggttggaatggtaggctatctcatatcgcctaggtgtgtggtaggctataccatctaggtttgtgtaagtgcactctatgatgattacgcaacgacaaaaatcatcaaatgatgcatttctcagagtgcatctccacggttaagtgacacatgactactttatcatgatggcaaattggacctgctttgggacaaaatacctattgtttagaaaagcaggaacgggatgtcctgaaagtaaaattgtagaccaaataatcattggaagtgtacctttcattgaaagttgttcagcaaatactgtattgttctgttattcctctctgatgatggacaagtgatggtcttgaacatgttatccattaaaattgtatttctggttcatccaaagagctcatcaaattgggtactgcaggggaaaccagcctatgtgggtccagatattcaagccaaccagaagtggtggtgacagctgacactgagcagggactcctgcgagccagctgccaagggttatgtggctggctggactgccaccagttagcctttgttcaatggctgccacctgcaatttgtatttccttcttatctgaaatcacctctcaaggaaaaaaaaaccaacaggtggagagagtaatttctgtcagctgataaacaaagctctgaaaggcatttatggatgccaaccagcagaagttgtgaaattaaaaaaacttccttcaaaccagttgtgcactaaaaatagttttatctatggcaacagcaggaagacaaattgactggagaataaccacagccagaagatgaccttggggaatggggggaaacgattttaaaaatattgaccttgcttcatgcttttgaaaggaattttataaatgccagttagtcttgctaaatgggcctttgaaatggaaggttggttgtgtggctgggtcgtgtgctttgcggggaaggcatgtgttgctttatggcttccccacaaagcacacaaccgggtcacacaactgacctttcggcacaatacttactgccgagtatttttggctaagctgttctgatcctgggctgtggaatgatagatctgtcaaggatcttctccagcaccttgctctcttgataataaaagactgttggctggtgttgctgctatcgtgacccgtcactggcacagagaaaaaacaaaacccaacaaggtcacaggataggactatctcctagcctgcccttgctgatatttctttctatttggcaaaggcttcctctgttaaacactggaatgggcctgctagtcattgttccttggctaatgtgtccctctcccatgtcccattgctgcctgactgggctaagttgtgagggtttggaaccaaggcgtcctctgggctaagggcagggcttaaacctgtgccggtcaaaaatgatggttgtaggctcagaaaaagaggtgcccagctctatgcttttgatctttcacattgccttgtttgatagaggatgaacagacctgaattctggagactcgtaaggaaacttgatttcccctagacatttatggagatcccatggcttttctacaaaggatatggaatgtgattttgacccatttgtctctgggggcactgatggagtgctgcgtatgaggtccctgttgtagtttacctatgctgtgcatccatatctgaacaagagacctggaggctggtgtcactaagccctggtcactggggaaggctttgaagtcaattagcctcaaatgttcttgtctaattgagttcaaggagctgtgggcccagggctgactaactagagaccatgttaaatatttcaacccaagatacttctcagcactcatcatgccttatggtcttacggaattccagtacttctccagcacacagaagagcaatacagtggtgtttacctctttccctctttggtgagtgatagttcctaagtgtcaaccacactcctggctctttttcactcttaaaggccggggtgatctttctaaaatgctaaatctagtctcctgactcgtctgcttcaagagcctcctcagtactgccaggaaaaagttcacactccttagtgtagcatccaggccctctggtttggcccgtgcctgtgctgtttcccctccctatatgtggtcttctcagatattccaaatcgtttgccatttccccgagctttcgatgccgttccttgcctctttgcttttcttcatgtttctcctctgatgagtgttgtctcctctaggaagcctgccctgaaacctcaaccctccttctcgtgttcccctagaggcctgtgcatgccaccattacttgcgtcacctgtgattacctactggaagacagggcttaggaaccacccctccccaggcctggtggaataggcagttaaaaacagaaatctcaccaggtcctacgtagaggagccacagttaacattgaattggcaaatggaaaaacaggaagagaagccttgggttaaatccatcccatcacttctgacccacctgggcaggaaacgggtgacaaatacatgggaatgctggcccaggtgaggaggttgacagttctgggaagtcctccaaatattcgagttgcctcatcctgctgcacagttggagcttcatccctttggttcagtcagtggttctcaaccagttatacacagaatcactgggaggcttaaaatagccatgtcgaggcctcatcccaaaccaattaaatgggaacatcttaaagtacagaaaagcatgagtattttttaggaagcttcccaggcgattctaatgtgcagcaaggctaacaatatttctttaagcattactcccttctatagctttcttggaaatgcagacactcctgggacagtgttgcagaaaggtcccttgagccttgtgggatgaagggcagggtggtgatggggcagggagggggagtcctcgcactccaagtcacactggcatctttgtgtgccttcatccacctgtgttttctctctggatcttggcgtttggggcacattgtgtgcctagtacagaacacagccacagaaagcaggaatgttttgtatgcctctgagctaagaatggttttcacaggggcctgcaaaacctaaatatttactgtctggctctctacagaaaaagttcgccccaccctgatgtagataattgggctgcaagttcagggccacagcagagccaagaggtctaatctagatggggcatacactgttccgcatgcagcctgctgcaggctcctgggatttgatccttgtgctgagcagagagtgtggggtctgttccccctagccacacttacaagggccccaccttttatcattaaggggagctgggcagggacccacagtcacaaagtggaacaggcctgagagaaatgtaaatgcacttggctaatttccttagggaaatccatctttgtaaactggcaaacccctgtcacctccctgaatcatcttctccactccctttttatttgagatagatatttttcccctgggtgagccaaggtgcctgaagttgagagcatgatgttactggatccgcagagtaccccgtaggtgagacccaggccctcatctccacaaaagggtcagaaacaaggcctgaggggacccatgtagctccccaggggccctgagttgccaaaaagggttttgttgtgctttttcttgtggaggaaacctgaatgctacctgtccctcccttgctatccttcccaggggggttggtttcaagaaagtgcaaggcactccagggagtttcaggtatattcttactttgttttagttcaacctagaaaaaactacaaaacccaacactgagcgagcgcccatcatgtgttgatactatgctaagcaccgtaggggctatattaagtggtgacggtacaaagcttacttgatcactccccctatgttttcccttccgtccattgtgtggtgcatggaacactggaggcactgaaaaatgaccagttggattattgaaatgaactcagatttgaatgttagtctcttcctccaaagatttgaatgactcctcattgtcttctgactagagccagtgcttctctatcatgcatttgtagattgatagttcagcccctatctgtttgtccatttgcctgtcctacccaggcttaggctgcaggttcttattcttggaacttgccgacatctgtgtgtttggcacagactagaacgccttgcctgatagctgtctgctgttgttatgatggtgggttctccaaacctcactgacctgtaaagtcctttctgtccttctatacccagcttaaattgtatcccgagggtccttcctgagggactttcccatatattcccacctcccattaagattagtgttcttcttcctatattcccatgataataaagaatgtttacagagtgcttaatgcgtgccagaaattgtcctaagctctttacacacattagctaatttaatcctcacaacattcctaagagggtatagtattgttagttctttttacaactagggtaatggaagcactgaagactaagtggctttccaaaggtctcaaagctagtaggtgtcagaaccaatactggaagccaggaagtacatttccactatgatttaaccacaaagctatcctgtctctctacaccttgtattggttattccaagtgttcttgattgccttgtttgggtatatttctagattatgtactccttggaggccagcatttttttttttttttgccatcgtcgtaccctcatagtccctaaaaatatttcacaagtaataggtgctcagtaactgagtaataaagtatgctgagtccagcttcctgctttgatctcctggaaggaacccttgcccccagggacagctggttcggtagcagtggtgttcagggtaggatgcagttcttcgcattgtgcataacacaagccctgaaccagctgctttgggaacccctgggaataaagtgccctacctgcctttcaggcactgccaagcctggggcatctctggagattgtgtatccgagtttcaggagaccatggagatcagcctcgtaaaatgctcggaggtaaggaatgctgccttgatgttactcggggagattttcccatggggagattgcggaaggtgaatgaatggagggaggtagactgtactcggacaactttatgggtggttcaggggttactgtccttagtgcttctgttagggattcagagtaccttttagacctttagaatgtcccccttgctgctcctgaagcagtcctgtggaaggattagtctctttctggatctgtctcttcccgacatattttctcccagtctttgttattactataactactattattattttaatcaaaaccttacatatcttaacatcgttgccaccaacacagaaatctgtttccttaagaatatcttccgcctacatctacacaagttatcagggtatatttaaaaaattaaaatgggattattcttaatgttttgttctgcaactttctttcttccccatggccatacatttggctatcttgtaaggaagatgtgtgattctgttctaagctgggtttaaattgctcctgaacagccagtccatcagtgggtcagtgtttattaaagaaaaactagctttgctccttaatgttttgatcaaagcacctctgttgacaagagtaaacttcagacagggtgctgcagtagcctcaagcgcctgctgcaactgccaaatgtctttgaggtcatatgttttattttacaagttcattttattttatgcattctgtttaccttgtggctttgtatacctcagggtattgctcagtgtgagagcttcatataagggttgcccagctcatcataggaagtgtgttgaggaatatagatgggcagatgaagaatgggctcaagccaggggagggaccatctaacttttgagtgattggacccatgggaccccctttctgaaaattatgaccattaaggattacccctctaaaataatcaaccaaccgaaagtcatcacttacagtgttaatgtctctgattcattgaccaaattgttattttcatggaaacaggactgtgaggctaagcaggtctgtttcattttgaagcatataggatgatgataatatctagataatagtaaaaatatctggctgggtgcagtggctcatgcctgaaatcccaacacatttggaggctgagacaggattgcttgagcccaggtgtctaagacccatgtgggcaacatagtaagactctgtgtctacaaaaaataaaaaattagccaggcatggtgatgcatgcctgtggtcccagctatttaggggcctgaggtcggagaatcacttgagcccaggagattgaggctgcagtgctatgattacaccactgcactccagcctgggcgacagagcaagacccagtctcaaaataaataaataatcaaataaaaataaaaatatctaatattcatagaggcttactatgtgacactctccctttatcccattttacccttgagattcagagagattaagtaactttcccgtagacacacagctagtagatgttggagcctgtgtatgtgtgtatgtgtgataggcatatatgtacgtgtgtgcacacttgtgtgtgtgtgtgtgtgtgtgtgtgatgtggtgcaggagaaaaggacttccttttccctgcagaattatgcatggactagacccagcctaataggagattgttgagcaccacaggtttggattgtctctgtggtctgagttacactttgatgcttgtgcaaatgtcagactggtttcaaccagtctgaggggcctggagccagagagttgcctttctctggagggactcaagattccctactcaagatcagtgttgttgcccaccaggaaagagagctacctggtagtatggcttggtttctttttggccaacatgactgacggtgagctttgaaggttgcttgtaaagttggccccacaagaggcaatgatagccctgggggtcaggccacatctgattccggggtccctgggggatgatgcttgccaagaggaggatgaggatggagagggatcttgaaaccaagtcatgtgatttaaagaactggggttgtttcgtccagaagaaaggaagttcaagggacaggaggactgcctagaaaaaggggaattagtttgcagtccgaggacaaccctgggtccattaggtagaaattctggtgtaagctcagatcagcaagttagaggtgcctggtagcaaaatgcaatgccttggagggtggcaatggtgtacgtggaagtgctaacatgggtcccaaacctgggctccctaacctgttcatggaaaatgaacaggttggtgccacctgtcaggtacatttttgggtgttgggtttcttcaaaggtgggcaggttgaactcaagagatttttgacattccctctagccctgggcttctaggctgcagggtggttttgctaagaggccaccctgtggaccagtgcagatctgtgaacctgccaaccagactgggacgggggtggagaggatttgtttgctagggctgccatgaaaactaccacaacgccattggcttaaacaacagaaatttcttgtctcacagttctggaggttagtggcccaaaattaaggtgttggcaaggttggtttcttctgaggtctgtgaaggaactctctgttccaggcccttctccttggctgttgatgggtcgtcttaatgtttatatgatgatcgccctgtatgtgtgtctctccccaaatttcccactcttataaggacaccagtcattttgatttagggccacacttatgatctcatttttacttgattacctctgtaaagaccctttcttcaaataaggtcacattctgagatgccaggaaggcggtcaggacttcaatggatgaattttagagggatgcaattcaacccatattagggagccaacagcactcccgcgaactgagcccacatggcatttcaggcatgtgatggggaccatgagtataagagctaagaaagtaagccccggagactgcctgggttcaaatctcagctctgtcatttcccagccatgtaacccttcagaggcttagcttcctcatctgaaaaatggggcaggtaagagaatctcttaccataggtttgtggtgaggcttaaatgaataaatacctgtaaaacacttagaagatgcctatacatggttagctattactattattactgttattgtcccctcgtactacagattatagtagtccatttttccctctgttgagtaggaaaatgactttgcccctaagtcacccttcgtcaacagaatatgataaatcacacaaattgtagcttctctcactgagtggtataatgcttttttatttttaacagaaatggtgcaatttagactttaaaaaatcatttaggaacctttatccgatatttcagtgaaattttttggcagcctttaataaactgacgtgagaatctcagtgactagtgacaaatattcatggtgacatagctaattaaggagtcagatgtcttaccaaaactcataagcattatattttcttctcctaagcctttccagctaactgtcttacttttagtctgtatccaacaagcagggacagcttttttttttaaattgtagcaatgtacttgtgagatttaccattttgaccctttttaagtgtatagttcagtggcattaagtgcatccacactgttgtgcaactggcaccaccatctatctcgaggatttttttcatcttcccaagctgggattccatgcccattaaatactaactttccctgtatccttaccccctggtcaccacagttccactttctgtctctatgattttgattactcctggtacctcatctaagtagaatcatacagtatttgtctttttgccactggcttatttcacttagcatagtgtcttcaaggtttatccatgttgtagcatgtgtcagaatttccttcctttttaatattgggtaatattccattgtatgtataaataatattttgtttatccattcatctgtcaatggacatttgggttgcttccaccttttggctattgtggataatgctgctatgaacatgggtatatggacttttttgaaaaaaagttgtgattaaacatgtacatgtatattgtagaaaaattaaatatataggcaagtagaaagcaccctcccttcccaatagagatatccactgtgtatattttggcttctttccctgtaactatatttttgcctatacttgtgaaatgagatcattctatacatattcttatggaaactgagccattggtaaagaaatgtttgaaatagatcaagtgatttggtagtttccttccttgagccccagggtggtgggtgcctgtgctgtaccaggctggcctggtactgtgaaggtaaggctggccttatctcctctatggctcctgtatgatcaggacagtgttccccaatggaagtaggggaaatgggctgtgagaagcccaaggtcatctggctctttctgccccaaatgctgactcctaactggcctctcctttccctctcttctaggcaaatgtttgcagactacggctgaccgtacctcctgagagtccagttcctgagcaatgtgaaaagaagattgagagaaaagagcaggtaaggtatctccgaggcaaagccccaacaagttccagcctctatacccttaacccactctcccatctcctaaccaggccattcccagaggctgggtgtctgcacctctgttgaggagaaggccctctcaaccttcccacctcatctcccgtcttcccagaagacagagagctctccctagccggctctgccaccgacgtgccctgctcttgtttcttggtgaacactatggctttgtgttaccttgaagctgcagggacactggtcttagtgacaggtgctgtggcggggaacgtgggttttcctgaaacagcccaatccagttgcttcaaagggcctattgtgagcagctggcggggctggaacctttctcagcagcttggagcagcagccgggggctctgctcccgcagaagagaggaaaggctggcaggcaggctggtgcagggaaagggcactttcttggctgggggtaggaggcattcggcaaacatttttgtgacagctcctgtgctaagtgctgaggccgtgaagataagtatgtccttgccttgggggaatttgcagttttctgggtgagacgatgatgtgatatttcaggtgttaagatccagccctatatgacggaatctgggaacacagagaagggaataactgactgcttgggaggtgacagtgaagttggaggcttgaaggataaagaggaggtcctgctgacctctaggcctgtggtcctggccgacccattttactcattcataattatggggcacctactgtattccaggcactgttgtatacagtgggaatatagtagggaacaaagcagtaaaccaaatctgtcatccatggaacttatattctagtgggacaagaatggaagtaaacaaaataattaagtacattttatagaggttaggaggtggtaagtgctgatggagacaaagtaaaagaaggggtaggggtgccaggaagtaggcagtactttttcttgagcatgtattttatatgattataaagtaaaacaaaataaaatgatataaatttcataaatggagtcataacatagtgacctcttgaaatacaagcttgctttagagttaaccactaatgtggtcaactataaaaaagaaagcttctcatcgatggctaagtgtttgataatgtccctaagtttaccataggtctctgtctctccttgccctctcctccccactttctaccaaggacagagagctgcctgtgctgatgcaaatgatgaatgccagggaaaggaagtagggagaaaagcaaatgaagttctgactagagaaaggtgaggagtaaaattgctgatctgcctaaaaagagtggatgagttccactaaaaagatccagaaaaacagctagttctgggttgcagaagggaaaagatgagggggatatgggacctctggaaaataaggtttcactcagagatgaatggggtcctagtaaaggacctagcagccagtttgaatgggctttcactggccaaaatgggaacagctggagcatcaaaaagaataatgacagtcatggcttataacacatcgaatattaaaaaaaatccatacgtttgtagtgataattggagaaggggagtagaggcacgagatcagaggataaaatagggaaggctcccttttttttatagaacactagctaataagtttagaaaatctttgttttgtaacctccaggtatactcatcaatagatgcaaaaataagttggtgaaagattattgtaggatattctcaaagtatcaccccagcggattactgattctaaagggacagtaccttcacagtggagtaggcaggcagccagcatttcaaccaagtgatccaacctaacttcaccaatagtggaacgagctgatgttacatgacttctgaggtgattcacctaagaggtgcacatcacatatgtaatattcatgccaaacttgtttaactgaatctaataataaggaaacagaaaaccaaaatgtgggacattctgcaaaacaattggcctgaatccttcaataaattcaatgttatttttaaaaaagatgagaatttgttgcagataagagactaaagagacataacattaaatgtaatgagtgaacctggattagatggtggcaaaaaaaattatataaaagatagagcacatggacgcaggaaggggaacgtcacactctgggggactattgtgggatggggggaggggggagggatagcattaggagatatacctaatgctaaatgacgaattaatgggtgcagcgcaccagcatggcacatgtatacatatgtaactaacctgcacattgtgcacatgtaccctaaaacttaaagtataataataataaaataaaataaaagatatactgggatgactatacaattttgtatatgaactatatattacatattattgaataaatgttaattttcttgtgatgatggtactatggttatgtagttgagtggctctttcagcttctgtgtagctttgaacattctccacagacaaagtttgggagtaaaagtcctaagcagagagtggaagtggtcaggcttcagctgctacacccctgctgatgagcaggattgagtggggccatctgtcactagggagtgtccccttctgtcctcactgctcctctccctgcctgtcccttttagagctaatggcttggtccaagacatgggtctgggctgtgtccaggtgctcagagctgcttagaacactttttgaagaagtggcctaagctggagtgagggacaggacaagggcctggtggcagtacctgttggtacagacggtagaggaattggggaatatagtcttttggagttagacccaagcttcatgccttgggagatgttcgtgaaaggtttctgagtgccaaaactggggtggtaggggctggaggaccctggagggtctgtaaccactgaagaagaatcaagtaatcccaaggaaggagcctcgtgtgtttagctgtgtcaactggagtcaacaaattgtgtgtcagtttgcctatttggcttgaatagtgcttttcaaacttgtcaataggaccctcttttttaaaaaaaaatcagaatgttttactgagccctcatatgcaaaccaagcaaaagtggtactaacgggggcccaagtcctcccagtctccctttacccctcagcccccagacaccctcctgtggttgcttgagaactccaaggccctgaggagcacaggacaggcactgctgggatagcatatgcaccaggatacttcttacaccaggtggaccaggcgtgcagtctaagtgcctatgtgtggcacattggtgactcactgcagaagaactggggtagaggggaggagggtggggctgttgtttccctagggatgaagtccttgggtggtggcagcccttgaagtttctaggggtaactgggaggctgctctgagtgatttcgtcaccatgtcctggccaggttcctggcatgagtcactgagggccagggccatgcactgtcggggagactctgtaggggccacttccttggatgtggtttcaacatggcttcccctccttggaacccatggaattgcaagaggccaaaactctggatgaccctccctggtcacgtaactttggttcctttgaaggggcttcttctgtgtgcaaaggccaggggattggagctggctcagatatgtgagtagaaagttgtaaatggcccgattgacttctgttgcagtgagacttctcaaggatttccagggccctgttagagccgcacatgatgagggcagcctgggccttccttagtctttcacactgttctgggaggtgtttaatattgcggggatgccacgatgccatgggacagctggccatgcatagaggctgctgccagttgggccattcttccgtttgctgttctccagttattggagaaaggaattgctcccaatgtgggtgtgttgtggatggcgtattttgcccatttccacaaaggtgtgtttggaggctgctggatgcaattacaacagagtcagcaccttcttatggagtcaagggtttgtggggtgtatttggaggtttcctatccctaaggcagatgccctggctgcctgttccttttagtccttcaggagacatcaactgccccgacactgctttatgctgaccacagatgagctcccaaatgcacagcttcctcatctttaaagtagacacaacaatgcctggtttcaaattgtaaataagctaatatatgcaaaatgcccaccacagtgtccggtttataatatggattaaagaggtaatgactaaacactgaatctcttccctttgaatgccaaagccagtggccctgggtctttgtttttacccccttagaccttctggagttattctcctgcctgaagctgcctgtctttattttccaaacacatagcatctcttccttcctcataacccttgctgaggccctagccatgcttggagtcccttcactgccatgtctcagtttatctaagtcttccctgtccttgaaggctcagctaaaggcccacttcctttctgataacttcccagacttctatgtgctggggtggtcactcttcccttaacctacaggacacccaggctgcccctttcacttggcacctagccacgtgctgctaagaactccacataggtatagatatatatttttgcaaaatttgtatataacatgtatgtaggcacatacacacacacagagaaatgaggttgagtctttttattctctcttcccaaagcctaggtggctgccttgcacatagtaggtgcttaatgaatgcttattgattatgatgattgagttttatattagcttcctagggctgccacagcaaagcatgaaaaacgagatggcttcaataaccgaaagtattctgtcacggttctggagttcatatgtctgggatcaaggtgctggtggtgcctcctctgaaggctccagggggagaatttttctttgccgcttccagctgctggtagctcttggtaatccttgccttgtggcagcatcgctctgattttcacatggcattttcatgtgtctgtgtccagattttcccctttttatagggacaccaatagggcccagtctgatggctttctcttaacttgacctgctctccatataattcctaggtactggaggttaggactccagcatatctttttgggggacactcttcaacccataacaggttctttgaggaaatcaccttgaattatagtaacaactcagatgaattagctgtgggcttttatttgaatattgaacattaaaaatcattaataatatgggagggaggatgctgattagtttgtgggcacaaattacatgttgagaaattgataaatgtagaatataatgtttataaacaggctgaacattcaaattaaaattggtaatagttttgaaattaagtacctgttgttttcaaagaactctctgaatttatgtatccatattcttatccatagtcatgtgcaacagattcctatgtgtatatgcagggacacacacacacagacagaacccacaccagctattgcagacttagcatattgaatcagggcctcactgcacagttgaattttagggcatctgatctgagttgattctgcgtctttatgatggtaaagtcctttgcaaatagataaaatagcttgaggcagataccgttttaaatagctattaacatcccagctttggaggtgtccttcagtgacctgttgtttttaaagaagctgttttctctctagatctttgagaatgctgagtgagagagagagcagatgcgtgggtatggatgtagagttgggaactttcataacccaataaaatgttgaaaaggaggaagtccttgccagtaggttttatagtcctctttcctttaaaagccttggatgaataagcctgctgagttctcgtccttggcgtgactgtttatacaacctcgcgggctgttgccaagtgagcgagtgtgctgccatgattcagagcttcaggtgggggccgggctgccctttgtgacagcacaccagggactctgcgtgcccctcagagataacagcccctggaggatggggagagacctagagtttgagtcccggcttcctcatgaacccctgtggtggttgggccagtcaggtcatctctaggggtctttgctgcttcttctagcaaatagaaatgttagtctagagccagtgtttttccaaacattcctttattcacgttgataaatgtggaagttctattggtaaagcagtcaaggtgcagcgggtggagctgaaataagatcagggctatgttggctgcctccatcaggcccccaactcttcaccctacaaccttgtcagacacggaggaggagctgggaatagtgtctgaaaacccactggactatacaactcttttccatttttctaaccttctgagactttgtgattcactacccatgaagagaaaccaaggccactttgggggtgaatatttcgctgtcagagccactttgacaactgtaatgagaacagcaaaaagaccaagaagaaggtggacggacagacagactcattcagatagacatgtagagttgagtaggaacccatatactcaaaaatgtaaagaaaccacaccaccaatactagaaactcccagtatctactagtatgctattagcacactaggtgttttgtgtgttttattctgtgtattctttagactgcccactgaaattggtggtatgatccccattttagtgttaaggaccctgaagctctttaaagtacagaaaataactttcttaggggcacacagctagtagatagtggatttgcaattccaactcaggtctgtgacgggccatgttgccatgggaacattgacttgcgtgccttctcctatcagagaaactctgtttaggatatttacattttatcagtcaaggttaccgaaggtgtgtactatacccctgggttccagaaaagcagttcctgatttttttttctcccgtgtattcttcccttttccgcgggggttattaggcctaagcaactattgtctgcgttgaagctgtgtactagctgcacactagtctgcatggaagctgtgcactagcggtacgctagcactcctatcaggctgctatcattacaaatgccactctctttgggacttctgcttggctagaagctttccttttccttctcatcttaagctttgaaaatgatcttttctcctgagtttacttaggaaatgggcactattcagtctgtgagactgtcagaaataactaaattagttttattttttagaaacagggtctcactatgtcatccaggctggaaagcagtggctattcccaggtgcaatcatagcacacgattgccttgaacacctgggctcaagtattcctcctgtctcagcctctcaagtagctgggactacaggcatacaccactgcgcctggccaagtattttgataagccagaggtttcagtttttctgagaatatttatttcccaggctgtggaaaggccctttgggctcagaggtaatgttcatttttgtccaagaaagcaaaacagtgttaagtatgagtaatgacctgggccaaataatttgctgagatagatacacaggttgtacaagccagagcacattcccgaagtgccagcctctgcctgcaagatgggcagggaacccagtggctctgtgctcagcagtcccaggttagctgctgccctctggctggagaaaagaggtctgaagtaagaagttttggaaataacttggcttccagtctggaagtcacacgagtcacattatggcccttctcaaccatattggcagccaggatgtgtgaccagctgcccctcctggctggtggggcgggggactggctgtgttagtctgctattgtcagtttgatgcatgttgagctgcatttctgctcttatttcccctaagaatgctgattgaccaagggattttctttttttgcacagattaatcctcagtgtcaaggatgactgtatactccaaatattccatctttctttttcccttcaaaatgtatttatggagcatctatttatgctgggtaccagagatagagcagtgaataaggcagatgttgtccctggctttttggagcttgttgcattgtaggatcctatcttctcatttaagatttggacaatatcattggccttgttaacgcagactcttcaatggccagtaaatcccttaggagaggaatttaggctgagttagttttctgtagctgctctttctttctaaggcactggctgccagatgtatctttagggaggtcagccatagtatggggcctgtaggtagaatttatgctgtgagtactcacaggaaacagcttaatccagagattctgcgtatgtgttgggagtatggaatgccctttcagttaattttccttctttcctactttctttttattctacactttaattaagccttttattttctttttttttccgagacggagtctcgctctgtcgcccaggctggagtgcaatggtgcgatctcggctcactgcaagctccacctcccgggttcacaccattctcctgcctcagcctcccaagtagctgggactacaggcgcctgccaccacgcctggctaatttttttgtatttttattagagatggggtttcaccgtgttagccaggatggtctccatctcctgaccttgtgatccacctgcctcggcctcccaaagtgctgggattacaggcatgagccaccattcctggccaggccttttattttcaagcaaattctgtctagtattgtttcatgcccaggaggcttttaatagagtacattttttaaaatttgtttttttagtaccaagtagcattataaagaggcttttgatttttaatttaaatttaatttaatttaattttcttgagatagggtctttctctgtcgcccaggctggagtatagtagtatgatcacagcttactgtagcctcaacctcctgggctcaagcaatcttcccaccttagcctcccaagaagctgggactacaggcacacaccaccacatcaagctaatttttgcattttttgcagagatggatttttaccatgttgcccaggctggtctcaaatgcttggactcaagcaatctgcctgccttggcctcccaaagtgctgggattataagcatgagacaccgtgcctggccataaggaggttttaaaaaacttaattttggagagtttcaaacatacaaaatgagactggatcatgtaatgagtcattgatcctctctccagcaccagcaacctcaatacatggccaatcctgcctcatctacatccacgctgtataaggaaataaatatacatcatctgtatctcagcatgtttctctaaaagagactgtttcttaatatcatcataatgctcttctgcctaaaaatcaatacttttcttattgggaggtattttaaaggatacaagaggagagaaatttagccacaaacatcttgctcaacatatcagcttttttctttttttccccgtgttcagtttttgaccaaaagcatactgatattttataaaaatgatagccatctatgctcctagcagcttttctgggtatacatgttgtgaccggggtaaacattaactgtctgttcctccatctaagaagaataacaggtattcacttcatttggaccatatttatgtaccctgagtaattcccagacctctcccaacttctaaagttccctattcattcagcaagtatttattgagagactcattgcacgtcagtcactgttagatctgggaattacggtggaaaagaagacaaagtaggccctggacttgctgcaatttacagttgatagggaagcagggcttccccacacaaggatactgacatacaccaacagtcgctgggctgcagctgtggtgagtgtcgtggggaagtgctgtgagagtgaaccgagaagacctcaggggtctgaagggtcaggaaaggcgttcttgattcttgaggaagtgacatttcagcccagcagtgcagatcgagggaacagcatgtgtgactaccttgaaacaagaaggaggctggctcctaaaggaacagaagggaggcagtgaggcaggtgtggggttggggatgggcaggggaagtggaaagagccccccatcctgggcctgcctcttccaaatggccctgggacctgagagcaggctcttgggttcctacggctggagaccctgggatgctacatggagacgtgagttccagttgttctcctgactgtagcattgtagtgaaaaaagaactccaatttggaaagacataggcaggcacttgcaggctgttaccctggaagaagagaagtcatactatttacacagtagggtcattgtgaggattaaagaaaatatatattttattatatattatatgtaataaaatcacctgacaacaaatttcttccccctcctctttcttcagtaactttcttcttcacttttcctgtcagggaccatcagctccttgggctgcctcaggagtcctctcccctggtgtggctggtgctgatggccctgctccccagcgggtagagtcctggggccgtgcccttcctgggggcgttttatttagaccctgacatttacacaaatgttcaattcaaacataatgcttttttctttttgccaaaaaacattcaaagtctacaaaagaacataaaggaaaaagtgaaatctcattttcctgaggaaactgtcgttagagagctggattgcatccttctagatgttttacatacacaaacacacagtcttcaaacaaaaaatgaaaatttgaaatttatgatttttcactcagtgtatcttgatctctttctgtgtgtacaactttgagacctgggccactcgggagtgttccacagacttcattgttcctggcattgcttgtgttttccctgctccgtggcggcttcatctccctgcttgggccaggggcaggatcctctgtgtccggccacctgagttttcctgcaagccagtccacctctgaaagcctttgctttgcagaaatgcatttcaccaaagccttgtgttgtcattggcttgttttttaggaactgggtggagtctgtgactgaaagatcttgcttttgtttcctggtatttggggagtttcattagagcttttcctcttcctggttatatgtccagtaaattggggataagttaatgccagctcttgactctgctgcaagccatttaacagctcagttacccaaacttaagcacaaatgtaaggatagcatcagtgcctttggggcccagctgtaagggactcagggggaagcatttaccagaaacaagtacaaggaatcacagcttcttgcatcccatctcttcccaagtgtgggaagaagggcaagaagcaatggttgtagtattttcttactttttaaaaagattacattgaaacgaagcaaaacaaaacaaaaaacaagcaatatagaaaggtataaagaacaaggcaaaagtcaccctgatctctagcgcccctaccccatccatggttccttccttagagacctgtaagtttaatcatcatcacatagttttctagacctttctttgattttgcaaactttgaatgaatgggatcataaagtacttaaagtacataaagaacttactgttctgccacaatgaatgattttcaaatgcaaattaaagttttgtgtgttaaaaaatgctttgtgggccaggcaaggtggctcatgcttgtaatcccagcactttgggaggccaaagcaggcagatcacttgaggtcaggaatttgagaccagatggtgaaaccttgtctgtactaaaaatacaaaaattggctgggcgcagtggctcacgcctgtgatcccagcactttggggggccgaggtgggcggatcacaaggtcaagagctcgagaccatcctggccaacatgatgaaaccccgtctctactgaaaatacaaaaattagttgggcgtggtggcgcgcttctagtcccagctactcaggaggctgaggtaggagaattggttgaacccaggaggcggaggttgcagtgagccaagattgcgccgctgctctccaacctggcgagagagtgagactctgtctcaaaaacaaacaaacaaaatacaaaaatgagcccatgtggtggtatacacttgtaattccagctgacttggaagactgaggcaggagaatcacttgaaccagggaggtggaggttgcagtgagccacgatcacgccactacactgcagcctgggtgacagagtgagactccatctaaaaaaaaaagtgctttttttttttttttttttttttttgtgaatacatggcaagaatctctgtgtaaaggcagttgaaaagttagcaggacagcagaattacctttatggaatttgggtttctgtgctgtgggattgtcgaggtacctgggtcagccctagggaaaactgagagaaggtcagtttgtctgaagtctcagtccttgatcttggattttttcttacttctgtcccttccatgttgtggaggcacctactctgtccccctgcatctaaacatagcctgcagtatggggaggtgcttaatgtcagacagaatcacagagccaggcttgaatgtaggtgtgtgtccataagcaagttgcctaacgtctctgaacttcagttttctcagctatgaagtggaaaggacagaaaggacaattgctgtgtcatagagtggttgtgaacattaaatgtgattaggaatatttctagcctatagtaggttttcaacaaatcttaatttccccctttcctgcttgttaagccttcattctataaaggcgtgttaaggcttggacatgttactgtttctcaagggtatttgcatttcaacaatgaccaaaactttaactgaaggaattaagaaccagccaacaggactgggaggatccttttgggctgaagtcacaccacctcttcctggcttttcagaaatatttcatgaatggtcacaacaggttatgtactaacactacccccttttcttagaacttggccccaggaccagccctaccctcagaggacagtttggctgctagatgactgccagcctcaaccttgtgcattgtatttagtgatgaggttgaagtcatatggagaagctgggataaggggaaagacagcattattaagagcatgaggtttcaaatgcttgctcttcttactaggacaacgcaagtccgtctggtatctttgtgggaattactcttaggtgagtggacaggcccttatatacattagcaaacggtgctcttcctccggggtaaaagcagcccaagcctatgccaaatcaccttggtgaacagagactagatgggatttttgctccctccatctccactgccaggcaatgagtgctgggcacaatttgcataatcatacacagtgggcccgttattacaactgtgcatgaggcctaaagagtcattattctttttttcttttcctactttcttttagcttcttgacctgagcaatggagaacctaccaggaaacttcctcagggtgttgtttatggtgtggtgcgaagatcagatcaaaatcagcagaaagaaatggtggtgtatgggtggtccaccagtcagctgaaagaagagatgaactacatcaaagatgtgagccatttaagagtttttgccccccacctgtattctttttgtagcatgcaagagaatggagttggaagcattgaagtgaatgtaataaggcattttgaaagaattcttagtgttatcattttggctggaaatgtttctgtgtatcttcatggtaatgttaaagtacagatgtaaatctgcaaggaaggaaaggttgagcttctgctggatggatgttactaggtaagtatactcaggagagcagatggcttcctccttccgtgtagggtttggaggctcttgagtggtttttctttattgcacttaccagtcccacattcatccctggcaagaggaataggaagactgtgggtgattcagatcaatcagttgggttgaaacaaatgctaggaagtcaaccacaatagactttgtccaaccaagccaatcaatgccatttccttgtatttagtagtttatttcctatcttttaagttacatgttcttttgagaaaatttgggaaatataaacatgtatgaagaagaaaataaaatcactcataatctcactattcatccagagcaattgttaacattttggagtattttcttcttctctctctctccatttcttttcattccatcctgtgttcccctagattgactgattcccctcttgaccaaaccacccagcttatatggaagaggagatggcctgctctgacactgatgggctcacattacagaccagtggcttagaaagtgcttgtaagaggcagtgtaggggcagggagtcaacctaggcctgtgagctcacagaccttgcttcgagctccagctctgtgtctggcccagcaagtcacttttgctctgtgcaggcttcagtcctcatgttgagattgtgggggttggctgggctttgatacctaaggttaaaaacacagctttgtgagccccattttattttgtgggttttcagataagatgcaaactcatgatgtcttcgcttttgtgtgagtttttaaaaggaacatttcttgttgaatttaaaaaataataaatgcttagcagaaaatatgaggaaaagccagcaaaattagcacgcatatacataatgtatatgacagccaccaaccttaaactcctagttatcccacctttcaaacataattttaaaaatttattttattgtatattttcgagacagcgtctcactctgtcatccaggctggagtgcagtggcacaatcacagctcactgtggcgacacaatcacagcttattgcagcttctacttccccaccctcaagtgatcctcctgcctcagcttcccaagcagctgggactgcaggtgcgcaccgctacacccagataattttttgtagagacccagactggtctcaaactcctggacttaagtgaacctcccacctcagtttcccaaagttctgggattacaggtgtaaatcactgtgcccggcctccagacataatttttaaccattcagaatattcaattcctgaatttcctgttaagaatagctcagacattttaattttcttgtatttttttctcaaggaaatacatagaccttcctcacttaaatgctccggaggtatggctcctcccttagtaaccttctaaacagagtccagagtcccacattgcccaagacaaaggcaggaggagatgttggctaatcctgagctgtggatgacatgtaccaaagacatgtgccaaagacctggaattaccaccctccactgtgatccgcaacttaaaactaactttcaggtccctcctgccataggtggcttcagttccatccctggcctggtcattgcagtatttgcctttgggagggacatgcagctcaagattccacccactcaccactgggagcagcacaagagccagctcagggccacacatgaaagccgttctgcctgcctagaatgaaaagttgtacctttaacctcattttcccaaaatgtttgtacttcatggcaagaaagtagactctatttttagaattcatgtggggaagtctgggggtcttgactctcccttcccccaaatctccaccaatatccagtaacccctaataaacatgctgtctattttaaaacaatgtgcttcaaaattaagccttccaatactatgtcctaaacacttacattctaaccaaactgctatctttaggcccttcctaaaacagaaattctggagtgtgctggagaaaactcccttgagacttcctgccctatttgagggttcctgagtactttccccatcctagggataccagaagaagggaggagacagggactgtttgtaaggtcttttgttgtgttttgaaagtttttaaggtcctgctagccctctgaaagtagtactgtagagaaacttgaacagcgtttgtgtaaacaagtgtttttgggatcacttgaacttttgttatatttactgccttgcgtgttattggtgattactgaggaactgactttcaaatttatgggctccccagggttcatattttacttccttccattccagatatttgattgctctttggcagtcagggccgatagagggaaaattagaggttgctttttggtttctttggtcctcttagccatgagtctgttaaaacacattctacttgtaaaaacatgtgatgggaaaagggcaaaactttgcccaactgtcatttgagggtgataggtgaatttcaacaaaccattttttcttcagagtttatttggctaattaatatttattatgatagttacatgtaattatatataattttatgtaattaatatatattagcatatatttgatatattctatattaatatatgcctatatattttattatgtatataaaatatatacataataaaattatatatatataaattatttggataattcctaactagtttctaactagttgttgggggtgaccttctcccttaatttcctgtcttgttcttaagtttatttttatgtggggtccttctttctttttcttttttttttttttttgttttttgagatggagtcttgctctgtcacccaggctggagtgcagtggcatgatctcggctcactgcaagctccgcctgccggattcacgtaattcttctgcctcagcctcccgagtagctgggactacaggtgcccaccaccacaccccccaactaatttttgtatttttagtagagacggggtttcaccatgtcagccagggtggtctcgatctcctgaccttgtgatccgcctgcctcggcctcccaaagtgctgggattacaggcttgagccaccgcacctggccggggtccttctttctttagagtttcttaaaagttttagaaatcttgtatgaaaatgttatggcttgatctctaactagtatctttgtgggctacaggtgagagccactttggaaaaggtgagaaagcgaatgtatggagactatgatgagatgagacagaagattcgacagctcacccaggaactatcagtaagtcattatctcagttgcttggagatagggaggcatggcaggctcagagtggtccctcagtggctagtgcctaaagatattagagtatctagtgttctttatcaatagaattacattttaaataaactgagaaaattttatcacagaatgaaatttattacctaaagggaaatttttatggtaagaataatcgtattcatattcaaagcattctcaccaaagtcaggagcaaaacaaggaagccagctatcactattattatttaacattgttcttcacatactggccaaacaagagaaataaacatataggtttaaacatggcataggtagatgtaaaactatcactgtttacaaactatatgattgtatacctggaaagctcaagtgaacatgaaatgatgaaagaaaaactactacaaacaagtaaagaatttgttatttgtagcagggtataaaattttatacacacacacacagaggatataaaattaatatataatatacaaagaggtttcaatatacaaaaaattcccaaaatatcatcaacagaaaaatactacatacctaggagtcaactataataagtggaaagaaacaccatgtgcttagaaaggaagattcagcatcataagatccacattactgtaccattttaatatgacccaataaaaagaccaacaggttttgttttttataagtggagtaggtgattctaaggtttatatagaaaataaataaaaagattgggaaaataatgggaaaaaagagcaacgagagggagtagccttattaaatgttaaaagaaagtgaaaaagcctcagagattgaaacagtatcatagtggcacataaatagacaaacatcaataaaaagtactccagaaatgtacccctgtatatgataaatgtagcatctcaaaaaaggaaggaaaatggactagtcaatatgtgctattgggaaaacttatgtgctgttggaagtcttatacctggctaaattcctaaagtatcaaagatttaaatgtgaaaaataaaacccaaaagtgccagaagaaaaatatgtgtgaattcatttatacccttgaggtaagggaatgccttttcttattatgatataaaatcccaaaaccatgaaaagaaaggctgataactttgacaactttgaaatgagaaactcctgctggtaaaaatgtcaaagtcaaatgaccgggaaaaattatttgtccttcgtatcacacataataggctcattttctgaatattgaaagatcccccacgaatcaagaagaaaaaagctacaactcataaaaataggtgaaagatttgtaacaggtaatgtatactaaaggaaagatggagagagctcttttgtgtatgacaggatgctctgcctcacctcatcgtaagataaatgcgggttaaaaccatcccatgatataatttttatctattagacccgccaaagtgcaagagtgggtcaggacattgttcacaggcctgtgggcaaagaagagggttgctgatgaaaatgcaatttgctattactcttacagagaacaattcagcattatcgatcaaaattacagatgtttagatcctttgacccagcaattctattcctagcatttattctacaggtagactctcacatatgaggaaagacataaggatagatttatttattgtagcattgtttgtaatagtaaaacaattggaaacctaaatgtctatcaagtagaggaaagtggacaggcacggtggctcacgcttatgatcacagcattttgggaggccgaggcaggtggatcatttgaggtcaggagttcgagaccagcctggccaatgtggtgaaaccctgtctctactaaaaatacaaaaattagccgggcatggtggtgcaggcctgtaatcctagctactccgttggctgaggcaggagaatcacttgagcctgggaggtggaggttgcagtgagccaagactgtgccactgcactccagtctgggtgacagagtgagaccctgtttcaaaaaaaaaaaataagggaaagtaagataaacgatgtatctctacaatagaatatatgcagttgtaaattaaaaaaaaaaaaaagaaaaagcaagtaatcccttgaaggggagatacagaaagatgtagacggtgaaaaaaagcaagatgcaagaaaatatgtaggaaaaaattgctaccatttgtatagaacaggaagagaagataaacatatcaggattgttctgtgtgtgcacaaaaagttactaaaaggttaatccagaaagtaactaacaactgtttctaattgggaggcagggtggtaactgagcagggtggtaattttttataaaaatataaaagtaactttatacttttgaaatgtttgcaccatgtgagtgtattacctactgaaaaatttaagaaaaataaccttcttctagtttagccaagctaatgcttgtagacatttaaaaaaatttattattaatattcccaaagataaaagtccctgtctatgtgacgtaccttccataagagttaatatctgtgggaaagaagggcagttacaacagtcatgcatcagagttcaatttatggctgggctgtgagattaagtgcttaagtaacacctagtaccttgattataggagtggggctacgtaaatatatctccctaccccatttcttgattataggagtggggctatgtaaatttatctacctagccccttccttgattataggaatggggctgtataaacatatctacccagcccattcccactggcatgtgggaggacatttgtgaaattctcacctgcttatggaaagtcattctgccatgactgtcagacaccaatgactgtcatcaaagccaaagaattggatttgcaatagatgcataaacaagactctgctcctcgctttccatcaccatctcctacacaccctcattttctcatgctagaattgtcccagaaaccctgtctctctgcctactggtctcctccttctccaagtcatcctacctactgcagccagattaagattgctaaattattgctattgaaacacactgctgaacacaaagctgccacatgctcctgggcctggcttgctgcttcaattctgtctccactccccagagtgcacctcctgctctgctgtgccggggctgctttctgctgctcccagaggccacatggggggccttccaccctcagtcctaactgtatctagcctcttaccaatatctaggtcaagaatggcttctgactcagacatgttaaacacacacacccaacaaagacagcagcaacaacagcagcaacaaaacaactctttttttttttttttaaatgagacggagtttcgctgttgtcacccaggctggagtgcaatggcgccatctcagctcactgcaaccttggctcactgcaacctcagcctccggggttcaagcgattcgcctgcctcagccttccacgaagctgggattacaagcgtgcgtcaccatgcctggctaatttttgtatttttagtagagatggagtttcaccacgttggccaggctggtctcgaactcttgacctcaggtgatccgaccgcctcggcctcccacagtgctgggattacaaaaacactcttgagaattgagtgagaccaaagcatattctctccatggtgactacaaagaacaaggtggctgcagaagttatttcaactgggttctagttctaggagcgccacttctgagctgtttgacagtgagcaaatcacataacttctctgattgttttcttccttacaaaggacaacattctgactcctgcacagtgttgttgagagggctaaatgagggtctgtgagtaaacactatccaaaggaaggtgattcttgcccttctctctggatcatgcagatgttgacttttaatttaaagctttactttagatattgttgaagtagatgtggcttctaacagaagaaagttccagcctaactgaagattgtcgtgaacgtgtagggattgattttgtgtgactgtctcctcgatctgtccaggtttcccatgctcagcaggagtatctggagaatcacatccaaacccagtcgtctgccctggatcgttttaatgccatgaactcagccttggcatcagattccattggcctgcaagtactcatctgcttactgctatgacagggcaacccagcttaatcaagagtggggactgtgcctttgcagaaaaataagtcacagaacatccttagctcatgattcagaattctttaagcagaaccactgtgaagactgtgcccagaagacagtgtaggaaactgaaggaagcatttccaagctgagactctaaggctttgtttttgctctctgaaaaggaaatttagaccccgagtttagtgtgagagatgttgcttgcttcaccagatacccgagtggtcctcagcatcagtgcctaaccccacacgtcagccctcttcctccagtcccagtgccacaggaagtgccacctaatcacagaataacacagacttcactaaggacaatctgtactccttcatggcaagcaatataaaaaaggcctgtaaacacttttttataattagaaattattttgtatcagaaagaatcatggatattccacgtcttgtagtagcagacagggaaacagaaagacccggtatcttatatttgtgaaaatgcatgttgttatctcactttgaggcattgttttcttggttgatttggtttacaggagctaacccttcaagtgcttcccattcttactcttacaagtcccctaacatgcaaattaatttgaaaatgttcaaagcaaagcattgtatgtatttgaaatagcttcccttggtcttcatttccaaatgtatgaacaacagtttttacctctcctccaaatttatttggctcttatctttttatcctcctctcaaaagttccaaaacctatttcaaatcctttctggttctatataagtaattttagataaataaattttcatgttgggattctccacttcccctaattctctgataacagttggtatggcagcagtgacaacagcagggctcggccactgtcctggagtgggtctgggtggcctcgtgtttggggtcatctgcgatgcccatttctggtggggcttctgagtcccacccttttcctggctctcttgagtgtatgccagctttcccctggcctcaggccaagccccactgggtctggtttgctcagcagcctttgttttcccttcctcctgtggtcgggggggcttgccaaggctccctttcctcccctttcggacgctgtctcattcccagcccaccagcaagggctttatctcacctgagttcagacttagtcggtatttgtactacatctctggtttttcttcccagaaagaaaaatatatttgccagtattttctggcaattcttgtgctttgccatctggccaacactctggcatttactgcagaggtcagctgtttgagctgggccagctctgacccaggcaccttgactgattcctagttatcatgcaggctcttagtcctggacagccaaaggagccttatagctaaaaccgctgagagaaacagaaagagagagacaaagagagagggagagggagggggagggggagggggaggggaggggaagggggaggaggaggaggaggagaaggagaaggagaagccatctcacagcaggaaactcaacctggtagaggaagagggctgatgcacggtgttaggcactgatgctgaggaccactcgagtacctggtggaccgagtctgaagagagctggcttcttccttatgcaagaccccagcctcttccactggcccactctgtccactttcattattattgacagggagaccagacccttggtttgattccatagaatgtcagagctagaaagaactgagaggatctcagttttatgaatagacaaactgaggccgacagagagaaatgacatgagcaagatgcctacctagtgacagagccaggattagaaaaatcctggtctcttggaccagagtgtaggtttttgtgtggatacacgagtagaatctgtgaagccagtggggctgggggagtgggtggctggtctaggtggtttctaaagccccttgaagctcaaatgttctgtgactccatgcttccaaatagcttcagtattttctttagtatctaatcacctccttcagaaattctttttcttgattcaagtaggtttaggagtgaaaggcttatattgtccaaagtagaggctgaggaattgaggaagcttcagagactgatcatctagacaagagcacagaggtgttagaaacagtgcccaacaccagggttttcacatcttctaatgtgaaattgtagatgactggggacacagtagaagatgactttccaacggcacagattctgtggaggccatttatctctaaggagagttaaccaagtagaaaccaaagcagtaaatagcaccaccatttttttctttttcttttttattatttttttagagatggggtcttgctctgttgcgcaggctggagtgcagcagtgtgatatagttcactgcagccttgacctcctaggctcaagtgatcctcatgcctcagcctcctgggtagctggggctacaggtacacacaaccatgtctagctggtttttaaattttttttgtagttgcccaggctagtcttgaactccaggctcaggtgctcctcccacctcagcctcccaaagtgctgggattacagtcatgagccatcacgcatggccaacactattgatttaaacatccttgcttcagtgcggcctggagcaaaaattacttgtgcggcttggagcaaaaatcacttgtctgcattaccaaattctgttccttagtacttctttattactacccttctctgcctaagggaggaaggtgaaatgtttgcaggtatgtgagtattctcagtcacattgtcactatcctggcaggcagtctagaagcgcagaagggatagctcttttaagaaaaaagggaggccgggcgtggtggctcacgcctgtaatcccagcactttgggaggccgagtcaggtggatcacgaggtcaggagttcgagaccagcctggccaatacggtgaaaccccatctccactaaaaatacaaaaattagccaggcgtggtggcaggcgcctgtagtcccagctactcgggaggctgaggcaggagaatcgcttgaacctgggaggcagaggttgcagtgagccgagatcgtgccactgcactccagtctgggcgacagagtaaggctctgtctcaaaaacaaaaaaaaaaaaaaaaaaagaaaaagaataaaaagaggaatatctctattctataaagctcgtattttgttttctgatttcattgtggcaatttgggaaatacagaaaaaataaataagaaaatagatacccatagccctatcacatagtgaaaactatcattcagatttcctcctggtctttttccccccagtgcataaacatatatttgaaccaatgcttatacatatttttcaaaatgggattatactatacttactattttcaaaagctgttttttttcccatgtgaaatgatgtattataatacttttccttggaaggactccattttaatccatttccatccatcctaagcagtggcaagtggtgttggcagcagctatgggatggtatgggagaggttttcagtccctccaagctacaggggcagacctcttggccaccatgggagacccacagtccctcacagcacagggtcccagactggcagttgctgtagcctaggacagctaccccagtgcttaatgataaggggatgccccagcatgtggtgcagcccatgtgttttcacgccaccggatctggttttgtttttattttcatcctcacagaaaaccctcgtggatgtgactttggaaaacagcaacattaaggatcaaatcagaaatctgcagcagacgtatgaagcatccatggacaagctgagggaaaagcagaggcagttggaggtagcgcaagttgaaaaccagctgctaaaaatgaaggtggagtataaaagcctagatttattttctatgaacttttctcctctttacttctcccttttctcttcccatcttcaacctttccatttccttttctccattctcttcttcattggatttttttttttttttgagacagagtctcactctgtcacccaggctggagtgcagtggtacaatcatggctcactgcaacctccgcctcctgggttcaagcaattctcgtgcctcagcctcctgagtagctggaattacaggcacgtgccaccttgcccagtaatttttgtatttttagtagagaaggggtttcaccatgttggccaggctggtctcgaactcctgacctcaggtgatccgcctgccttggcctcccaaagtgctgggatgacaggcgtgagccaccgtgcttggcccagtttggggcttctccataaatgcccccattgggcatgcctttcttggcctccagtcccttcaagggctctttagacactcaccatggtgctgttgttatgtaactgagaagacgcttgggatgcccacagatctgggacgtcagaagccttggagatctcttccttcactgtttagattttctttgaggtcccaaggcctttctgtttggcttgacaataaagagctgaggggcacacaaatagctggtacttgggctgtaccccaagtacaatattctcaagaagaaaattggtgggtgactagggacactggggaatgtcccatttggccccctaggctgggagcattccttagctgaacttctaatgccctagaggcattagtgcccctcccaaatttaaactgtggatagacttcctacccggtgacaggagcagatccatgaatggctcctggagggcacttaataaattatatcttggatgaattcctttttatgtaagtctgtggtttgaaaattttgctcagcacagacttaggctatcttatgagtagcgtatccacatagtttattgctcaaagcagaatatgtgagggagtgaaaggtggtactattggtaatttagttagggagacaaactgggaagtgtgggccccttcacaggggtaggctgggtggggaagaggggctgccggtccaccgcccggtctctgtattgccgccctggggatctgctgccagttcacttggcctgccacagccatgggacagatcatctcctctgtatgttcacttctaatagggcagctcttcttttccgtgtaagagttactttctcagtaagagttacttggggggtgaaaaaagtttatgttgctaaaaaagcctgaaattactgatttaagtaatttttttcagcttaggggatttattcaatcattcagtccacaaatatttattgagtgtctactctatgtgtgtgtcctgttcagtcctgttggttccagaggtggcctgtcaccaggcatctggggacatcattaggctgcttggcaatctggctgcttccctggagtccaggcctttaactccagcccacagttgcctgttttagagactgatgcttgttttcatcctgacagtggagttaaaaaggtttctcctactcctcctattttactccccaaattgggaaaaaaaaaaaaagcttcaggaactcagggtatgttacatgacctggatgcagagtgaatgggcctccagggacagagcccttccagcaagctgtgcgtgcactgcaaatggagcacacagcacacagggtctctctcagctggtcataagctctgctcaggactttccactttggaacttcttggtgccaacacttacccagtgatgagaagggagaagtcaagggcgtcaagagagacttgtcacatcttggaaataacatcatgtaacctattgagtttgaagaatgcttcccttttccagagtttaggtatgcagcaaactcagctctctgcaataggcgataacctggaaggaggggatgagagcaaaccttctgcagcataaaatcaatggcgggaagtctgtgtgtgagaacgtggcctggcaaacaggaggcaccagccaccaccaacctaagccctgcccacctgcaactccactgactttttctcacctcctaagccaggcctgcttcagtactaggggtgccagcttagtgttccccatgctaggttggaatgtttccaaaagcaacatttaggaaagcacaagggtatggaaagggtgagtccagatttctcctttgagcttagctggtcttacctagaaactggcttggccaatgcaactgatgagattgcgtagagaaataagtttctaccttttgaaaaagtcactcatgtggagcatacctttgtcctgagaatgcccccaaaattcgtgtgaaatgccacttttatttttctgtggctctgctcacccctcttcctccctttccctgttaggtcttgctgtgtctctctgctgcagaacccagtggatgggctcactacctctgtgagtccccacatgaaatgtgcagtggaagctgccaattcctctgggccctgcaaaagctgtcgttctgaaatgagtctcgttgtaggtggaatcgtcccaagaagccaatgctgaggtgatgcgagagatgaccaagaagctgtacagccagtatgaggagaagctgcaggaagaacagaggaagcacagtgctgagaaggaggctcttttggtgtgtgtgttgtagctgccgatgtaaacttaccgggaattgttggttcattattgttggtgatgtatacgtagtagtgtttattcttagaggtgggtcagtagactcagccatgggtaagggatcaaggaattattcatctgctcattcactcccctcccctcttcccctctgcctttattcatccccgtctctactcagaatagccccttgtctctgtctctaaatacacacctttttctagctcatctgacaatttgccagcatctaagcaaaccctgggcttgcccgcagctgtgccctccctccctccatttggttctctctacctgaaatttcctccttccctatctttgatcttgcctaagctccctaaaagccttaaatgccactctctccatgcctggagtctcttccagtcatggagccagaaccattatctgtccttaggaagctcactcactctctctctgcttttactttggaattcttttatacctgccattagagtggggctgtgcgtctcacatcttggcttttccaggagattataagttcctgaaggcggggactccatgtctggctcatctgtgtccgtagaggcttaatacatgttctgatgattgactgggttttcttgttagtaatgagctgatgtattgcattatgggagaaggatctgggaattctgcattcaattccagatctggttctaattcccttacacttctggcaaatacagtgacattctgagcatctactcaatgttattaaacatttgtaggcctcttttacaccttttggatataaagacttaagggaaaaaagggaaaaaaatgtagtgaggcccattaaccagccacatgatgtatctttattcataggtgagaaccagaaccgtgaggttgagttcatgatctgtgagacactttcaggttccaaggtcatgttttaaagagaaatcgtgatctagcaaggcctgagctgattggatcccggtgagtagcctcggtactccatgcctgtacttaggagggtatatttcttttgcaggaagaaaccaatagttttctgaaagcgattgaagaagccaataaaaagatgcaagcagcagagatcagcctagaggagaaagaccagaggatcggggagctggacaggctgattgagcgcatggaaaaggtaggacacagcgttgggcctattgcccacttgcccaaacttttccctgtaggtccatctgagatacgagaggccctggatatggattcctctcacctccaaaatttgcaattaaaaaaaaaaagacaaagctataaaataaagtataaggaagtccaacaacgttctcatttttcccatgataactattttgatgcttttaaaaaatattacttgtgaaattctttagaaaaattaatattttagcagccttgctttgctggtgccccaggtgtgaacttagtttatccattgaattatcaagccctatttaggtgttacatcaacacagcagccctgttgtttctggggcatgtgtctcaagggttggcttttccttgacacgctggggacttgagagagtagggaggccccatttctctaggtgttgtaagcaggctggtgagtgtggtgggggaacctgaggaaggcgggagctcagctgggataatgaagcctgtctagtgaaagggaagaggccaggaattaagtaggaagtggaggaaggggaggaagtggtgggagaaaggaaagaggaaaagaaggaagagaaggaagagaaaggatgggtgacctttagcaggtgacggctgacttctggacccaggagttcagggccaagtctgtggctggtttctgggaatggctccctggctgcatatgagtttgcagagagcagtgacctgccaagaccctgacattattagcaccctgtgactcattcgggatgccaagaatctccaatctgatgatggaggcagaggtggggcagcaagagcaaggtcactgtcaggcttcatgtgatgctgagaagaggtcgccttagctaatggtgtttgcagcataagcccctgtactgtcccctcataaggcgaggtgtcgccactatgggaactgcatgaaattcagttctgtggagcttcagagctcactgggtgcttcgttttagctctttagctttttacttgggagagacttgggcaaactaaagagtcaattacaatctcccttctaccccctgggaaaacagaatcccatcttttattgaagagtaggtgattggcttagtcaggactaacattagtattgaccagagggggtggtggtgaagattgggcaacaagggagctttctagagcttgagtgagcttcctcccacattattgtcctcctacaacagcagaagatcccagttaactcagatgctctctctctgggcagcaggtttttctgcagcgtaaagaagcaaggtgagccggcagcatagcagggtggtctgggggagatgccgtcatacagagaaaccacaggtagtggtcatgaacataggctttagaatcagacagtctggggatttgaatcttgtgtctctttgtagttgtttgcacttacttggtttttcctaactcagtctccacttctgtaaaatgctgataatggtacttcttattcttagggcttttgtgagcaataaatgagaaaaatccacgccaagtgctaagcatggttcctcgtatatagtaagggttcgatcatttgtggctatgatttttactctgttacgaggttgcctaaatgtctaccctcagagtcaggttgtctttagcacgacccattttatgcttatcttcattgctgtcttgaggttctgaaagtttcttgtctttccccactgattttcacatggagccctcatgtgggatgaatgggtagagccaggaagctggtaaggccagccctccctgccagcatttaggaaacacaaaaccttccccaagtggtgttggcttcttctttagtgattggaaatgtattgtcctttctctaaatcttcctttccatttaggctagagaaatgctctatttattgaactaacattaggtaggccaatttacactgtttccttttcagggataaatctgtgagagcaggaatctggccaaatcgctgtctcacactacgtgaacggcatgtcctaggcagggctgtggcagtgtacgtatcctgctctcagttttggattttgctcaaggacaaaccatgtgcttttgaatggcttctctgccatatgccttagtttactgtttctcttgctgagcactgtatttcaaacacctttttttctgatcagtaaaaatcttttaaggagtgttctctaccagggacccttctggggaacagataatagtctatgccataatctgggcagtggtttcacaggtgtttacaaatgtaagaaataattgtgcagtgtacacttaagatttattgtacctcaatttaaaacaaattttaaaagtgtgctgtaagttagaccttgctctactttatgacagcctttttctttcttgttttttgttttttttttctttttggagggaggcattcacttgtgaaagcttttatcactgttatttcggggctaatgtaaaacttccaaccacataggggcaggaggaatgttctgctcaggccaggccataagaatgtgcatttgctgtagagatttaaaaacagtaacaaaaccccagtcaaagttgatctacctttgttattttaaatatttcagagataatatattcttcctgcttaaggtggactgcttccccacccctttggcctacctcttggtataccactgcttatagcttcagaagttgtggcagttaaattttcaaagatttgcttttaataatttggtagaaaagaggtttggaatctatgtagctagtaagagtttgctgggtggaatttccgaacataaagatgaggaacattagttcttagagaaggacctaaagtaaaataatctcccaattagtgagcgttatttgataaacttgcattttaaggaaatttgttacactaacatctgtaatgtatttttagcacaatttcggttatgacaggcaccatgtttttatgaacatttttcagctttgtccaaagaaatgattccagactcttttttgggcaaacttctaaatatacatatatatagcaaagtgtacaaagtgcacggcttagtgcgcgtatgtttcctattgctaccatagcaaatttccacaaggttagtggcttaaaacaacacaaatgtattatgttccattcctagaggtcagaagtgctaaaatccaggtgttggcagagctggattccttttggaagctctagaagggaatgcatttccctgccttctctaacttctggaggccacctgtactcctcaacttgtggccccctcctgcagcttcagaggcagtagcagagcatcttccaggctccttctctctgattctaaccctgctgcctcctcctccttagaagggcccaactggataacccaggatctccccattttaagatctttaacttaatcacatctgcagaattcctttctccatgtaagataacacataggattcaggaatcaggacatggacatctttggagggccatgaatctgaccacaacatatttttacaagtgaatacacctgtgtaaacaccacaagttagaatataggatattgccagaatcccagagcctcttttcttgatgattcagaaaataataaagaattttgcagtatcacaagccaccagtttaaagtattgataatcagtatttggggctataaattttcactgatcctgggctgatggaatactttggaaaatgaatcttgaatggttttatttaggatgttttgtctctgacccataaatatatctataaatacacaacaacagacttggcagttttgagccttgtttgggctttgctgagcaggtgtgtaaaacccagggggtgtcatatagacttggactccctagtgctagaattgctaaatagacattctctgtcaaacttgggatccattgattaaaatatcagtttctgtttgttttaggaacgtcatcaactgcaacttcaactcctagaacatgaaacagaaatgtctggggagttaactgattctgacaaggaaaggtaagacgtaatgcctttcgtcttgtaatggatttaggttgtggacacgctgtgtttttatgacctcatttgacccttacattttcatttgtgtggttgtaccttattacagacttaagcatacataacattgggctgagagtttccaatatggaacaagtttctttggaagcctccagccacatcctgcagatcatggctggttgttagtgtagtggaacacatcaaatactttcacaagtgcaaaagtttggtctattaatgttctccatggccttgaactccacaggatacaccttgttgatgagaaaactcatcagctgtgactaataccacttgctttggaaaccaatttaaaacatctttctttgtttccaaactttgcttagtaaaaccttgcattatcctctggcagtgagtatataaagccctacatgaaaaacacggaatagtacgctgtctgttctagaaatcaaaatgcagagaggccattcaggggtctctagtgaaggaaaacaaggttgagatgatttgagtgttttgggcaagtgacttaacctccctgagtcttgcttgtgccacatggaaattcatctttaaacgggggagacgggtatgacggtgataacagtgcccatctcactaggttactgttgttaagagaactattgggcttgctgcctgccaaatagtacgtgctgaaaaaatacccatttttccttcctcatttgcaatttcagagttttcaaagttacaggaggcttgctagtcattaacatagtgctgaggcagagatggggcacgggaactagaccaccagacctttcctccagtgcccagccccagcggccccagagaactgaagagtccaagcaatgttggagaataaattgtgctgttgtaaaacaaaagtatgaaatgttttgtgatgtggcttgctctgtttggatgtagagaaggtctttcaacttgtcccacatttgccaaaaataaaggatatgtagagcaactgtgattccagaccttttggtattctgccgttgatttcagatattttattgtgttgctggaccccttcttccccgtcctcccctccaagtaatttactggatgttccaatatgttaataaccccaaaacagagagcttctcagatctgtaaatggtgcaaaaaaattatctctcagcccctggaaaataatcatccttatatgggataaaacttgcaaatgggaacttgaaaaatagtcctgtgctcctctgttgtggtagtttgttagtaatcacactactttgtgtggtcatcacataaagtaagaagaatggatcttagagtttgatttcttgttcttggaagcatttttaaatgtttttaaatttacgtttatttttttaccaaaccttccccaaaagatacatgttttctatttttatttatttattttttttttttgtggagatgagggtctcagcatattgcccaggctggtctcaaactcctggcctcaagcagtcctcctgccttggcctcttgaagtgttgggattacaggcatgagccgccatgcttggcgctcttggcaatattctttaaagctgtgactgttgctactgctgttgctgctttggtttaggactcatttgcttttttctcctatttgtgttaggtatcagcagttggaggaggcatcagccagcctccgtgagcggatcagacacctagatgacatggtgcattgccagcagaagaaagtcaagcagatggtcgaggaggtaagcatctgcaaaaggtcacaggcctgggattgcttcctgtggtggggaagcatccccagaacaagtctgccttgcccctccatttcctgtggctcacaagccgaggtgctcaggccactgccatctaggcccagagtgggatttccccacatgtcccccatggactgatgacgatgatgcccctaaaagaggggtttcctcaggtcaaagggttacagttaagaaagctggaaagtgcagttcataagctcacccactgtgaaaggacagtgatagcctgagtgggtacccacagctcaggggacccaagggggtgatgggcagggtgaatttagcccaggtccctgcactgcctccacagccgtctgtctgtctctctctctctctctcagctaccattcttgtcctttatcgttttctgggtgtgtctttcattccctttccttgtctgtttctctcttttttctccctccttcctcgttctcttctcccactcctgcttcttcttccttttcctttgccaccatcctttctctcctaactgtctctgtaacaggaaaccaagctatacatttactgtttgggcatagtttactattctcttttttctaaatgagaaaacgggtaagttgaacatttctatttctctaagaggaacaaaatttgttttaacttgtgtcaatataatccgcctctcttgtggtgatgttccaaagaagaaagtccgtgctctgtaaagctaatcacatattattgtagttttcttcttgctcaattaaaaaatccgattgaaaaatctgatagaaaaagagcagttagtactaacagggttataagaattcccttgagtctaattctctaacctgcaaagaaaaaaaaaggtttcaatttaatcaaacatttggttggcagtggaaaaatgaaaacacattttccttatattaagtactactttaaaaagttatgttttattaatgaattattaaaattaaaagcatatctacttctaagaaataattcatgtacatgacagacaaatggaagattaaaatatatctattttattaatctctaagatattggggatattaatgttggggagttaaggtcagagaattgtgagtatgggaagggacatctttttttattgtgtgtaggataaacatacacattagataaaagtttgtccgcaaatgagaagtgcagttatactgtgttgaatcatgtacatcttatattggttcacacacaagtttctggggagcagtggaatagcagaggaggccacgcacgcatctttgcaatcgttttgtgcatccaggcaggagcactgcccataacagtaatgcggagggagatcctgccctatcgtcaacactaggtagatgtcaggagtgtattttccaaggaaaagcatcactttgccacagttagcatctcagtgagccttggccgtcggggcatagtttttctgcttttgaatttcacacgcacgaagtctggggcaagggcatcccttattttcccctatgcgagtctctaactgtgagcactacatttctcccacctcaccacaggggggtgtctgtgtcattcttgtatctaatcgttagagaactattgaacaaaacctcatactggttggcttctgattcacttaaacccttacctgtaagaggttaaggctgtaccagaatcagagacattgtttttttaaaagacattttcaaagaagtttagaattctctgtttcctaacttacttccagaatataacaaacctaccaatttgaagagagtgaaggagtacacatacgtacacacatatacatatgtgcatatgtatatgtgtatttatacatgtgtatacatatgtatatgtgtgtgtgtagggatgcatataaagatcactgtccatgctttgcttttttctacctgtgatttcatatcttccagataagcttctctaagctttgatgtggtctgtggtctggaaggcccagtcgttggaaagaaatcaccagctaaaatttaggatgccatcagagttagcaccccctaggggctggctgggtttccacagtgaatgtagaccaccaccaccaccagcaacaaaaagagagagagacactttttattcctaataatttttactgcctgatttagaaagtttgtgtttgcccagcatactacattaacttacataagaaaaaaaggatagcctagaatctcatttgctatagccatttatgtgaatattttttttaaaagttagaaacatggtcaaggggcatggacaggtgagcaccttcagaagagcaagaccaggttggaaaggagttgagaacctgagtaattcagggaactggggaagacatgcccaaggagagatgggagctgaattcacatcttagaaaacatgagggaatatgtctttgttttgtattgtgaagcaaggccaggccagaaccactgggtgacactttcaaagaggcaaattgcagctcttcattcacaacaaagaaaacatttctaatactggctgcactggtaaggcatttagctcttcatcatggttacgttctttacaaagtaagaagttgatttagaagttctctagtgttcctccacaaattctgtgttctgtaaccttaaagactgtgtggaggaagtctggtaacttcagttaagtgttcatcatataaagaattctctattgtttactatgctgtgcctgtttttgtgagctcagccttatcattatgttgcataatgagcaaaatcagcaaagtcgtaactaaatcacttcagatcacttggagcaaattttgaaaaatccggagtactgaattggtcacttgtgaaatgaatcttgaactctgactctagaagagaagtatgttttcatctgtgaactccggctccccaggcatataggcagcctttaagtgtagcggatgttaaggaccctttttcttccctcacatgggtctggaagctcgtcttcatcatagcctcactttcaccatggatggaagtctcgtctccatccattgttggtatcattttggccataatgtccatgaggaaacttagtttttttaaatgatgggcttcttttgtttagctcaaaatgtccaggtgtcactactgcgatccttgggaatccttaaatgttaagcaacatgtttcttctcaccttagtggagtatcattttatcatagtaataataaataataaaaagtaactggcccaggttttgtcatccttagctcattaatgacttgatttccatggtgggagacagtaggacttgtactatgtaggaagggctcatggtgggggtgagcccttttgaaatgaaggattagtatatatcttacggtgtcaaggtcattgagaaaagataatgcaaaacgttttctgtgaaatgtggaaccaagtccctctcactaggctagggctttctactgaattaagtctcctgtcatggatgtcagggggttgggtatctcccccatcactagttcttccagctgattctggctttgataaaaatgagagaacaaagccaaaaaagccccacgtgtgcctcttatagccggaaaatatagaaaaatgccgagggattggaaagaaaaagccctcaaggggaaattaattcattcatccattcagcagatacccaccagcacccgctccgtgctggggctgggtacacagtggggagtcaagcagacatgggccgtgctggcacggatcttacccactggtgtcacccgagttccagggtagtcttgcctttgggttttattatcctgttgaaaagctttgttgggattggtctttggtcctgaatcaagctgcattctttagattgccaggaaaggcactgggagagctgggaggagtgtaaaaagtaagagagcatcctgaggcccccacagtgcccctctgctcacacatctttgagtgtgacttcttcagtccacagagtcattcacaccctctttacctgctctcaccatggctctcctgctgccaaccaaagcagctctcctgccaaggggaaagtgatcttaaggaaaaaatcaactatttgccttccaagagggtgggtttacatttttgccaatgggcagggatattgtttagctgaataaacagtaatttcttaagaggttttttttttgttttttttttttttaagctatatcccagtgcagccattaggcatcctttcattttgtcatgtctttcttttgatttccctttgccatttgtgatataggaaatgtttcttccaacagggtctgaagggagtttcttttcatttgcagaggaggcattttctttagacttcttttgctgaaagcaattacactctaccccactttgctataattgagatgtttaataagtgcaaaggtgcaaggaattgattttctcattagtgcttctccacccaagctacacattggaatcacctggggagctttaagacatgcctgaacctggcagatgggatggaggcagactgagcattgggttttgtttcgttttaaaaactctgcaagtgattctaatatacagccaggattgagaatcgctgtcccggattctcagagcggtggcctgactctccttgctgggtttcatgttcatgcatttggccagcatccctcagaagctcctatgcctgaggtgggaagctgctggtgaactcaataggaagggctcaacagaaagcaagccagggagacagtcaccagggaccaggagcacagaagtgagaaagctggtccaagtctgtgactctctgggcactgtcaggggaccttcacttcttgccagcccctggtcctgggaggattctgtgacagctcactctttttttattttttattttgttttagagacaaagtcttgccctgttgctcaggctggagtgcagtggtgcaatcataccttcctgcagcctccaactcctgggctcaagtgatcctccccactcaacctcccaagtagatcgactataggcacgtgcacccatgcccagctaatttttgtattactgttattattattattattttttatagagacagggtttcactatgttgttcagctggtcttccaactcctggcctctagcaatcttcccatcttggcctctcagagtgttgggattacaggcgtgagccactacacctggcctgacagcctaatcttaatagctgtactggcctggtggtatccagataatacaaacttcccaaaggctatttagacccatctagagagatgttactaaggtgggaagaggtacgcttgttaaatagataatagaaacttaaagggacagaatccaatccacctaagtccttgaaagctggactaccactaagagagactaagggtgattctcatggatcctcttccaactgtgcatgtatgcacgtgtctgcctcgccctgctttaaattattcacttctgtctgtacagaagacgttacacttggccacatggtacccctttagaaagagaaggcaaaaacatcttggttaaataattatattagcaatgaccacttctcaaattcaaggcaaagcagaatattatttgtgattcctaaggaatgattttgaaagtatttaacggtcatctcttagattttttttaaagagtgatgctgtagtcataatgcagcagttccttgggggaaacaaactggatcagggagaataacagatgagtaagaactcttcagagagttgagactttgagtatctggctctctagccagttggccaaacaaggctttacattactagtccctaaatccacatgcatctgcagttagagacctttatgtgtctacaacaaaagatggcctagaaaaatagcaacaagtatggactttagcatcagacaaacctgcctttgaaaagttattagtttccttgtctataaaatagggttaataatagtatctacccaattttttgtaagagttaaatgagatgacatgtataaaatgcacagcatgttaattggatcataagaaataataaatattagtggctgttattattaccacctgtaaatgggttcggctgtgtatacctaaagttaagtgaactaaaagcaaaagtagctattgttgatttcctgagcaatgcacggggctgccctttatctttccctttgggagtcttgttggccacattcaatctttgggtatacttctctcttctcttttgtgctctgtgctgttttctagcttagccatcaatctcttcacaagaatatttatacaaaaagcgatttttaagatttaaatttgcttcatcgcaagtatctgccatttttacatggttcagtcatttgctggcacacaatttaattcaaaactgttgtgtggtgtgctgaaatgtgcaacacacgaaagtacattttactaaatgccctgtgtttagaggatttcaagtacttctcataattggtaattagccaaatgggggtaggggaaaggagccatagcaccaagcccacaaacctaatccactcaattgaactgtctccagatcatgtcgcacgagctcttctccagatttagtctccggctctttggaagatgataagttggtagcctgctctgggttggaagcgattcctttattgttcgtgattagaagaacacttgtacactctctgctgggaagaggtggtatttatctatgatgagccaatgaacaaaacaggaaggacatattatttaaaggaaaatttgaccatgtggggctcttgtttgtgaaaacacccacatactgtcaccctgacttgtacagcctcaaactgcagagtcaagagaactcacagatccacagagtatttttaggaacttgagtagacattgaagaaggaactgcaatgaaaaaggctactgaaaaaccattcagaaagatccaggtggaggcttggaagatgaatccttacttatggaaaagctgccaaagacatctgctaaggagatgggaagagagcttgaagaatgttagtgctctgggaaggaggtgctcccaccagatcacccccaagaaagtacaggagcagccaggtatccatgtggtttggttctatttgtatatgggaggtggccctgaaggtgtccttcctgaatggatatcaatactcatcttaggactcttctaagaggagtttagcttgcttctatcaccatcagcattttgcctgaattggttcaaccaacttcacgaaaaggagtgtatctgataaagagaaatctatctggctgaaatatgttgaactgaaacatccttcatgtatgttttatttttatagaggtctttcttgagattgctgcaggcattggtgttttatcagaacatggcagttttgctgagaactagcagtagtagctgcagtcatagcaatgggtggcatgagtctacataagctgggagatggggctcgtggagtgagtgcgttcagaggcccagtgtccctcagacgttggctagttctccactcctatcactccttcatggcaaagcaggcatgaagctgctttcttgctaatatttgcctttgctttcatttagatgcttctacccagcttaagcaaggagggaggggatgggaaagaagcagatgaatacttttccgcattagttattaaccattaatattgttcacctgtgcacggtgctgtgtttagacacagatccccagatacgatgctgggtattcagacttccactagggagacagaggcagatttgagaatctcatctggatgttagcttagtgttgttacctacactgttttttagggacgcctttattgctgtaatgtttttctaagtctctggtggaaaagtcactggcatttgttctagcagcattgattcattgccaagttttaaaaaaggaaataattaagagaatgcaatgacctttagagaaaacaggtcacccatgtaagtcctgctttcagggtggtgtgctttcttctgcttttagagtttcttttctcttttgggctatgaaccgtacctggaggccaggcaggccttattctggagcagatagtgagtgaggttcctagagtactgcatagcctgagagtgcctcctaagtggatgccctccacacctcctgcacttggccctggccctgggtcctaggctcattgttgatcttcttagatctgggttccttgcattgcaggacctacctcagcctgctcttgtctgcctttgctgatgcccctcaattcacctctttcctgcctgtactgtgatatggtgtgaacttgacttatactgcttgtgaaacctgagtcatgtgctgaaatcctgccccgccaccgctttcctcccttaactggatccttagccttggactccaaggctacagctctgtctcgtggccactcaagccccacccaaaggaggtgctactcaaaagtttgaggcaggagtgatttattgtgaatgacaatgttatagtttctaattctagtgtttagcatggtattattccttatttattttaaaatcttagacaatttatctaaaatgtcaatttttagaaggtatcagcacaattgtggcagccttttttctgtatgtgttatatgtattatttaaaaaagcaggttcattctatgacaggtattggtttcggtattcacaatataaattgtcttttcaagggaaaggatattttctttggaaatgtcattgaatctatgttctctttattgaaattgttctaattgactttgaactgtttctcagacacctggtgcccagtttctggccatagaaactatgtgaggctgagtaattcatgttttgggtcactaccagtcacgaatgcttctctcattccaaggctatgcatatggatgtcacattcccatgtcaatcatctctggaaggtattattcgcccagttttttaagcatgggaaactgaggcttagagtcttaaaaaataagtagctggcagtctctcagcaaataatgatggtgctgcactacagacccagatctgtgactccaaagtcagcctttgttcttttcttcttgttacttttaattggaaaaaaatttaaattgcaaaaagttgtagagtgataaaaacaaaaatccacgaatgctcttctaggattaacaaatgttgccattttggcacacttgtttctgtttttttttttttttttaaagaaaagaacacatcacagataaagaagaggttctctttttacctgtccctgattctgttccttttccttctttcaccctctcttcttctcagaggcagtttggtctctaggccatgccttgatgattttactgtgtatatatatatataaaattagtatgtggcttagtttgtgttttaaattttacgtaaattttaatttataatattaaaaataaattgtattgtacatattttgcaacttatttctcagttttgtttctgctgttattccacatagatctggattattcatttcaatggctaatatccttttatttgaatatattgtaacttatttatcctattgatagacatttttattcttttacaaacaataccaacatgtctccaggcttctctaactaggaagtatacgtaaaggaggaattgctagggcatgggattggcataatttcaccttttctagatattgcccaatcgctgcccacagtgcacatacctttccaccagtcacatgtgagagggcagattttccaaatgctcatcaccacttggcactgtgtggactataattttggccagttaggaaatggcatctcattgttttcatcttaatttgcgtcagcctgattactcattgaaacttgtgaggttgagaaacttttcttaagcttattggccattcaagtttcctcctttatgaaatggttgttcatgtcatttgctcatttttatattagattgtttttcttttttccagctgacttgtaggaactctacatcttatcaatattaatcatttatcgaaaactatttgggtgccattatcttctcctagtcaatgttttttgtttgtgatatcttttataatatataagtttttaatgttggcagaagtaaagttaatctttttggctgtgttgtgtgtcttgtttgatgtaaagatagtttctgtaatagttttgcagtttgattgttcatctttaggtcttcaattacaacctgcacatccatcccctctatcctctttcttactctgtttttctccatagcacttatcatccaataatatgtcatgcactttatttatctgttttgcatatatattttgtctgttacctgtttccttccactagaatgtaagtcccatgagggcagggacttgcatctattttgtttgtggttgtatctctaacacctgggatagtcactggcaaatgatagttgctcaataaatatttgttggacaaataatgatccatgtagaatttatttttgtgtatcatatgaataggactccttttatttttggctcacggaaagcttgtttctctaatagcattgccgtactgatttttttcacgtcgctttcgtcaagctggagttgtttcccctgtgccattgtctttgaacaatcctgttttcctgcccctctgctgaagactgaaggaaactcattccttgggcttaagagtgggaataaggatgaggaggagccaggtacaatttatggggagcttatgggacagttggtacacgtttaagaagagcctcttatgagcatgagtgcaaaaatggacatgagttcctgctctcagaggaccttctggctgacatttaaactcatttgaacttgaggcagaatgtcataggtgctggaaacacagaagctgggaaacttagtggttaagttcataggctttgagtaaattcagtctgcttttgcatcctgcctctgctactgactaggctttgtatcttgagcaaattatccaagattcagtttccttatcaataatatgggaatggtcataacattacctcctcaagtggtagttatgaggattgactgatgtgatgtgtgctaaatgcttagcatagttcctgccaggacaaactaattctgatgtgggtggagagtctttagggaggaggtagtgtttgaccaggccttgtaggatgggttggatttttctaggcagggattgaatgggtggacatgtcagacaagatatagaataaataaaagcaaaaacatgcagaccagaaagtatagggtgagttcacagagcattcatctagtttggatggtacgagggagtgagaaatgaagaggctagaaatataggttgacaccaattgtgatggtttattagcaccaagccaagaaggatgtccttcatcactctgctcataattcctcaatggctccccattgcctgatcagatatgagctccagagtggtggctctggccagtgggtgctgggtgaataggaggggagaggagcacggaggacagcaagaaggctccaaggagagccctggctagtgctagagagtgtttactttccatgcacttgaactttaggaagcgcttccaaaatgcaattttttagcatcagctttgtgccagatgtggagctaggggcttccatatatatgtattacatgaatttgaagcagttcactcccttggacactcctgttcaggatttggtgttttgtctctgaaactgaattcatcgagaaaagcacaggggtaaataagcttcatccccatctccattccatctgcctcctcttgaatcatagagggaaaaaaaggacagcctaaagaattagggccccagcagatcctttgtgacagaagatatcacatgtcaaccttcctcccagccctgccaactctccaggccagctttgcagccataggttgtcatcactgggaggatggaagcaagcaaacctctgaacagggtgtggtgtgaataggacagcctgggccttgccctcacagatgcttacttgggtcgtaatatcagccctatcagcatccagatgattgtgaagggagtgaatgaatgatgaaagtcttggcacctcagtttcatggtctggtggggataaccacatagggttgtttctgagaatcgtgagctaagccagcaaagttcctggtagcttgcatgctcctcctttcttccttctcagagaatgtgctcagattgggaagcagtttaaccgtccttccctgacatttgtacagccaagtcatgtttaggtacccgggggagccagagtgctcctcctctccttctggagaagttgggttatctttaatataagatagaaatcaaaccaaattacattattttacctcagaaccccgttgcaaccgatccttttgaatggtatagttctattattatatattacttcaaacttaataggaaaaaattgattaaaatatgtgccatgttcatatctagcctggctgaatgccacaagacacattaattgaaaatgaatttccacaaacccaatcaagcatcatgaagatgaaaaatgtacctttttccctccattccttcattgatttttcattttccccactcagtgcttcatttagcaatttttcagtttcgttttgttgtggccttaattcatttcctttactcccccccaaatgagataatgtaccattttcttcatgcttattaaactcttctttcatgctgcattagtgcagggcagattctgatcttgtcatatttctctatgcattattttttttgttaaaaataggctgagcttttttctttttattcttacattttgtggtggcttttatcaaagagaatggactttaaaaaatacagtaactatgaaattacgatgttacaggacttccaaaatagaattaaggaatgctatgcaaaaataaaacactttttctgaggaagagtgtaaaatatcaattattctcatagtcacagtgggtatgtggggaccagacacaattcctcttttgttaagagaattggaaacaatggtttaccagatcatagagggatcaagaggctgggttaaagacacagcactgtcaggaaaagagcaggcagagggagacgacggctgaagcccaagtgagctctagaaggttctgtccctgacccagtcagttcaccatttccctggatttctaggggttttgaaaacaataatggggatcttcaaagtatttccttgtaaaattttcaaattttcaaataacgtgatggcataaatttcccctgaaaaggctgtaagaactcacaataaagtatcatattcctctcttttgacctagaattcatagccctagtaatctcgttttgattagatgctttgattggcagttatacatctttgataacattttcaatgtgaaatgaattattctttcgttaaagccattttaagcagaatgtctataaatgagggcccacgagaaggaataacaaagcaggggtgttggggatggtggctggggagctttggtgtatttattaacctgtggttgagttttgcgatgtgtgcaagtacacacagccccgacactctgattttgaaaacaatgaaatgaaaatgaaatgaaaacattataaagaaatttcaaataaaataatttaaaatgtttattgcaggggaagtttatgccattacattatttgaaaatttgacaatttcgcaaggaaacagcttgaagttccccatagaaatccagggaaatggtgaactgactaggtcagggatggaattttctagagctcactcaggcttcattcatttaaaatgaaaacaaaataaaacaaattttaaataaaataaacaataatgtcaaataaatgttcaaataaaataaacttaatgtggatttaaaatactgaattccattttccttataagatttaaacagtttgattaaatgtgaccatcagttttgtttttcgttttctgtttttaaagagtttatttgagcaggcagcaccaggccacatgcaattgagggcttcacctagggggcttgaggggaaaacttttataggtgtttatggaagcaagacaaggaaaatatttgattggttaaagcagaaagtccctacttaggccacacctgtaatcccagcacttcgggaggctgaggcaagaggattgcttgaggctgggggtttgaaaacagcctaagtaacatagcgagaccctgtctctacaaaaaattaaaaaattagccaggcatagttgatcacacctgtaatcctagctacttgggaggctgagatgggaggacccattgagcccaggagtttgaggctgccgtgagctatgattgtagcactatgctacagcctgggttacagaggcaaacgctgtcaaaaaaaaaaaaaaaaaaaaaaaaaaaaaagtccctatttagaggttagaggttagttggtgttttctgattggttaaatttaaatttcattttcctaagctgtgaccattcattctgacatgggtttcagtttgcttaggtcagaacccaaggcactggagccacctcagcctaatggcctcccaattaattattttaatggttcccctcttttggctagcctttcatttgtgagagattgatcaagttttagtgtgacatcttctgttaccatcatggctggttttcctttgtttcagcgggaaactcctaagtgtgacgtcagttttaacctacctcctattatcagtaagagggggcaggagggggagttgattctacacatgacactcccagtacataatcaaagtgatgtgcaccttttatatgctctgtattggtgtgtttcctgttttacataaggcatttttcgtgtttgttatcctttgccagctggtgaaagaaaataccccaaagcacaatttcttaacagcccatgtcaagcgctgtctggtatttaatacttatttgctgctgtgttttcttcattaatttctctccaagttcaatacggagttatgtttcatgagtcttgcacaattgagtgctactcacatgactacaatgctacagccatctcattttctgtcctctgatgtgaaatggactgtgtcctacatgttactaatgggaagaaattccaggaagttgagaagcctcacaacttccagctgtggattcctcactgaatccataacagaaccatactacatttttgtacaatttcactttggtctggttgacgtataagctcttttcaaaacatattggggggactttttttttttttagctatagcaatctgtttctaacgcagtttttatttaaatgtgcagattggcaagggtgatttcagctcctgagagaagttatcttttatatgagataattgatgcactaaacacttgttccctgtgggtttggggtctagtacaagggaaaaaagtcaactaaggatggcagtaactatgatgtgtcctaacaggggtaggttcaaaggctgagctatcacagagaagggggacacaaaggcagcctggaggacttggaaagcgctggcctaggtgactgtgggtagattgtgacagcagcagtttttctggtggaaaaggggatggagggtggggaggcattcctaatggagccaccagcctgtgtgttcaaagtcctggaggcgggaccatagtgtgttcatgcagtgctgagaggatggagtgtcctaaatatagggttcattgtagggacaggatgggcatgaaatgaaagtgggaaaatagggagcacagcggaagggcctcccgtgccatgctagtgagttcgaacattaaaagcgtagggggtttttaattgggagagtgagatagtctgcattcctggtaccagagcacctgtattttgtaaaagctccctccatgggtttccagcgtgtggctatggttaaggatgattacttagctcaaaccacctatgcaggtaactcgattgtagctaatgtgaaaaaaaaaagccatgatcagttttaagaaactaaaagaacttttatttcccctccctccttaaatatcaaactggcctgtattctaagagactaacatcctgcatgattgatcgggctgcaaggcccatattcacatattcagtctgagttacaaagaaacatactcatcaaaagaaaaattagaaaaaattctattaacatcagttaaaaggtcccagattttatgaaagtgtatttttccccttgttctataaggaggcctactgttttgtatttaaatttagctgttgcaagattctgttcttgtataaatcaaataggtgaggtccagaaaatgagtgcttctaatttctcagttcttaatgccctggtttgagtttggtaacttgcgtcatttaccaccacctggtgacagctagaactaaatgcagctttgtgaagggtaaattgaaggtcaaactttaacatttaatgcatcaagaagtgagatcaaaggtgcctaatggatttcttgcataccagctatatggtaacctggattttggagtagctcctgatttgggggttgctctggggacatgtgtttagcaagatcatcttggcccaactgggcctccaagcatctgatccagacagttttccccctgaagtctatgggatggattgtttaggaatggctggatggatttgttgattcattcatttgttatctgagaatataaagatgatcaaagtctttactcttgggaaactcacagcctagggaaggagaaacatcagtaatcatataataatagctaccttttgagtgtttatcatgtgctaggtgctacaagagacaatatttcaaggttctttgaagttagtagtcagaaacaataccagccacacaagtgtgtgacttaaagtttgtaaaaaatgaaccaaaggcttgagagtcagatgttcctaggaggctatcaaacccaggagcatgtgagtctatttattttagaagctgagtgcgtcacttgggaaagggatgggaggttcttcggggcagaccactggggagactaagttgggattcaaggttggcaccccttggggccggcagtgcactgactctgccagccttagcatccttagtgctcttatctgaacaagtcaattcagatcacagaatatactagaaaagaagtttctgtaagaaatgttccaggataaaagcaaatctgcacagatagcattaattcagcacaatagcatacttgtttcttggagcaccattgctgaaaaccatgagccttgttagaagctgccgcaccctcaaatcctactcctgtccagctccttctccccagaaccaagtgtctctccagactagcatcagccctctgctctctcatgagaagtctagagaccttctctctatagcactctctctaggtgatgtattaaccattcactgatttattttttaaactaccatctaggggacagtgaccagtaggatcctctcaatatcttactatgagctgctcattaaggtgttttaaaaccacctctcttgctttccttgcctcacaagccactctgatttcttcagagacagtgaaacgagtgtatttgaaatcactttttacatcatttgattaaatattacccctgactttcttggaagcttttagttccattttgcctttcatttaaagattttaaaagttaactttaacaatcttaatactataaaaaggaatgaaaaagacataccgtgagagtaatttttgggaactatttctacaaaaatggaaggaagtttacacaaaacaaactttaaccctaccacaaccccagaagtattgcatttatccaacttctcttccagcttttactttcatcattgtaaacttttgcttttctatcccttgaggctttttgtaaactttccattttgcagtatatttgtttttagtgtttgtgtagtatactccatgaaattgatatttcataatttattaccctttcctttagtgctagacattaaggttatttagtgctagacattaatagtccatattaatggaaataaccttatttctctctattataaataatgggagcaagaacatctttatatatagagctttttcctatgtttgaattatatccttaggataaattcccaggagtgggattagtggatcaaagggtatgaacagctttatggctcttaatatttattgctaaattgcctgaagggtcatactaattcacaatgccacctgcaacacaggagaggagctgcccctcccagtcctgccaacgctcatttcttcagtcaatagttttgggcaaatttaataggtagtcaagggtaaccattgctgtttttaattggtgatgtctttaactattattaacattggacattttttcttacgggtgtttctgttctattttgtatggtttacttttcatgtcaaaggattacattttttgacaccatgtgaaatttaaaatacttgataatgaaaatgccaaatgcacacagaacagagagagtaattgatggagccctctacgttacccaggttcagcaaatagcaagatttggccatacttgctttatctactccttcctcttttttcccctcttgtgcagtattttaaagcaaatcccagacattctgcatatgtttcctatacacttcaccgtgcatctctgaacatatggactttttcttacataattataacactatcatcacacctaacaaaattaatgataattccttgctattatttaataccaacctgcaataacattttccaaagtgtcttttcttctgatgctttgttccaatcagcatacactgtgtttacatttagttatgtttctaaagtctcctaatctagagcattgctgccccatctctcccgactacttttattcgtacctaagaactgagtcagttgtcttgtaaaaatgttcacattctggattcgactttttgtgtccgtgttagctctagaagcttgattagatcaagtttcaccttttcggaaaggcaagaacacttcatgggtgatgctgtgtgtttcatcgtgtatcacttctggggtgtataatgcctggttattccaccttgggtgatgccaaggctgataatggagtcaagtggtgacaacccaaaacatgattgaatgttttttcattagcttttaccatcatggtttaatctactgatgatggatgcttgaagccattatttcatagaaattgcaaaattgtgattttctaattctgtcattccttggccattgattaactggaattattctgtcaagtaaaactagggctttttagagtctcaaaatgcagtttgaacagagaaggcaagacagatgctttattttttcctccaaactcctttccaagtaaggagttgatgccttttttacatccattggagtccagtgagctgttactgttttattctaaagacatataatagtcatgttctttaatatctttatatttcatgtgttttactcaattacactcattattatttttgatgttcagaatgttccatccttggcccaaggggagacacctcatgtccttgttttcaggcataacaaggtatctcacgttcatctagtttatttttttgtcccctgaaatgagccattccaccaagatgtcctgtgtttttttagtggggaatgctatttagagaccacaatctgcacatgttatgttcttattgtttccaagttttctcagtagatagtgtagagatacatattttacaaaagaaaataaaaattatgaattcatactgatattgtcattttaaattgaacaaaattttgtttacttctttgatttcacacttgtattgctttctcttacagtaaaaatcttggttccaaacatgatgataccacaatatacatcaaacggtttcaaaataacttcagtgttactgctaacaatcttctcagtgaatgagagattactttgcagctctatttatctttaataatccactaagaatattgagtcaaattactgtattctaataacacttggattaatacttctcaccaatttgatatacatcgtttcttcaattcagtttgttctcagattttagggttcactttttttctttttggcttcattttattttttgaatctgtaaaatatgctttcaaagttaaacctatgtaacaaggcttatgtttattacataaacctatgtaataacttatgttatcctgtctccttcacctaagttcttccctttccctattggtagctatttattaataattagggttcattttgtctttgcagtgtttcttttgcaaatacatgtgcattcatgtgtccccacctgttttacatcaaagcgagtatactgtctaccttgccatacacttcatcagtgtttttgagatctgcattttttggaaggttacacagacctccatcataccatgcatggtttaaccagtcgcttattgatggagttctgttttgtgtttcctaaaataacacatatcctttgttcatatcatttcatattttggccagtgtatctttggtatctattcctaaaaatggaattgctgagtcaaagggttaatgcatatgtactttttctagatactgctatattcgcttccataggaatagtgtcattttgcatgagaaggattttaaaatttgttttgttttcagacagggtctcactttgtcacccaggctagggtgcagtggcatcatcatagctgacttccaccttgacctcctgggctcaagcaatcctcccacctcagcctcccaagtagctgggactacagggacacaccaccacacccagctaattttttgattttttgtagaggcagggtctcactatgttgcccaggctggtcttgaactcctaggctcaagcaatcctcctcccttggcctcccaaagtgctgggatcataggagtgaactactgtgctcggcctgagagtgattttttgaaataattttgtgagcacacaaatttaatatacaggatttttggaaagttaatgtgttattaatgatcctgcatactgttcccactattatgcataacacggcctggtacagagtactctggttcctgccttcagggaagctatggtttgtctagggagacatgatgtatgattggaaaacaaagagtagtctaagatagaatatattataaaaaacaaagatggatctttttaggaagcctttcttgcttactccaggccacatgagtcttcagtcctctgaatttcaacacttttaatgagacttctaatgatccttttttcaaaccaacttttgacacttggttgaacaaatatgaatgtattgaataacacagccaaatgtttgaaatgcaggctgccctgcaaattcaagccgaataatcattttttggagagttgtatctacatttcccaaagcatgttctctggaagatcttctggctgttttaaagggttacacagcaaaatcagtgtggaaatgttggattaatcaaagctgaggagctgtgactccagaatcatgtctgctgccccaagctcacctgttcacacaatccgcctgtcttggagcgtctcgcgttaatactgttccacgaaacacagagaatcagtatgcaggctgtttcaatgaaaaccatccagccccactggaaatgaggaaaaatagaaatagaaataaaaataaatgaaaaccaagggcatctattccagttgataaacctgtacttacacaattgtacatttttgattaacaattttccatccctttctttctagattgaatcattaaagaaaaagttgcaacagaaacagctcttaatactgcagcttttagaaaagatatctttcttagaaggagaggtaaggatctctgtttctttaagttggtgtcttccctaccattaaattttatgttgctaagcctaccaccgacacttaattaaaaatatggctatttcccggccttataaaattgattgagggttaagtgccagccttgaaaatgaggttctgacagctgtttttcctttaccatcggactcccctcattccagttgctgctgacttctgctttttggctctagtttttcttattaaagaatcatcctagcaagcctgataagctgttgattagcactgataattccccgcatttgtccagtgctttataatttgtgagatatgttcatatacattccttacattattctctctgcaactttaagaaaggcaagactaagattattatctctgtattaatacatgagaaaacagaggcacagagaagacaggtggttttgctcaaggttgcccagcttaataaatgtcagagccaggctgaaagactcctaaatccagtgctctcctgtcacagcgagtgaagatgtgttagaggggacttaattttacctgaaactttcagatgcttagtattcttgactttctggctttttgaaagtcatttggggattttgtatatgttccagagaagaatattatggggttggaagaactttacaaggagaagtcaaaatctatttgctctaaaggttctttattagagcttggcattgagcctttgccttttgagacttcctgaaaagctggtttgccaagcacctgtccttatctgtgttcctcgttatagtccttccacagtgagagagcccagcagacaatgataaagtaagaagaaagagaagagaaaactttgattaagccctgctgtgtgttgggcactgttagttactttggatatgttctgtgtaacacagaagttaagagtggaatccaacttacccaagtgtgaaccctggatctgcttcttatcagctgggtgatgtgggggaagtttcttatcattataaaggagggatcataactgtgctatgtgtgggtgacagtgaaatcagaatgtatagaaggtgcctggcatgtactaagcactcaataattttaaacgtattattgttgttccctctttattaaaagggacaccctctgagttagatgatattttcccccttttttagatagggaaactgaggttcgggggtattaagaagtctgcccaaggttacagtagagatgggtaagcctggatccagatcctgagctctgaaccaccatgtttgagtgggtggtgagctgagccttcttttactctgtttttgaggggttgccttacagcagtcataaccagaagtccctcatggcccataggggcctggcaccagattcaacgcccaagagtctctgtcttttgaagctgagtaaatgggtattttccccatttccactcctgtcttccctgccacagtcattggctcagtgccagccttgtgaatgaacatttctgtttctaagattcctttctgaaattgcagctccctgtgggaggaagcacaccttccccagtaagagtcagaaaatgagtgccctagtggaagcccatgtggccaaagagaaggcagtcacaggagagaggaaagacagactgacaggagaggcagaaggtcccccaagacagtgccccccacccccacctctggctgtgctgctaaagcaagctctcctactggtagattcttaaatgtccaagggaatattgcacatggggagtaatcttagaaatagctatgttggtttatgctcagtgtattaaactcatgtctcaccttagtttgggttgctccagcccttgaaatgtggagtccagatagtttatctgggaggcgatctcaggaagccccactaggggaatggggaaaatgagacagggaagggaagagagccaatagcggtgccatatcaaggaggttgccctgaggacagctgaggctcactcctgctggggatctctgggagatggtgtggaagtggccctgagctttccttactgaaaggccagaaagctggggcatttatccactaactcccatcagtcattagctgaggcctgctctggggggttgtggcagttctagcctgccctcggcagagccagttagactctggtggtcaaaggaagcccccagatgaagaatcaccagtggcctgttaggaaacaggaatgcccagaggatgtagcggggtgggtggcagtgtcagctatgtctatctaataagcaagactttgaaaaccagtttttttttgagcatatcaataatgattatcaatttgattgattaaattccctgaaactatttaaattccaatacaaatttattatgactaattgcttttggccacttcacacatccaccttaaatagcagacaatatatacaaaaaaagttgcataataacaagatttaataatacatttagacttaaacctattctaaaatactaaatatcatgggttttaatttattttgtcattgtttctgttcttgttttttttttttttaaaccttcctgaggccattgttttacttctttcaatattttcttagggctaacatcattttgacacctttcagacaggtgcagtcatctttgagatccaaaagagaaaggataccttctctaaattgctaagattagaggatgtgggttacataggttcttggttgggtcacaggaccctcagtggcttcttccaaggtgattcaaacacaggactccttatcactgtctttagcactattaaaaacttatgcattctttatcaatatttcatcatacatagctaggccatgtagagatctcctctcctagggaatcagaggtgacattcaaatacttggttttcctctttggctctcagactagctgatcatttacacacactctgccgacgctgttccttgctaattgtggatgatagctaatgctgacacgttgctgcccaactctccacttgattgctctacggcacggatgctaagcagtccttctccaggtcctgaagtcctggggtgacctaacttacatgttctttagttattctttctaacataacagaaaacttttaaatagatatctaattaatacctcctaaaagaaaccacaaaagttttggtagataaatctggtagctccccatcttactaataagtagctacatttgtgaagagtgcaattgcagactccagactcagactacctgagtacaaatctcagctctgccacttagtagtgatgtgatattgagcaagttaattaactgtcctatgccttagttggcttattggtaaataggaactctctctgtgaagtggcatcctctccatagagttgttatgatgattaaatatgttaatacttaagtgattagaaaagtacctggctcatggtaaatgccatatgtgttactgtttctttaattgcctgcgtcccagggactcttttattgtcattgataaatattttagatttatagctatgtcccataatgaatcactctttctcttttgctcatcctcaaagttggagactatcatcaaactcagctgtgtgataatttaacaaagagaatttcacctttaggtgaacatgagcagggattgtacaagccaggtcctactagcaggccatagggcccagcagtcctttgcctgcagcaacctgaaaggttcatcctgggagggtgaggctggacgtgagtcttataggctggcaatatttcagcttcttttagcagttggccccgatatttgcagaattcataggagtttgggattcatatcaagtcttagagtttaagtgtcataagctgatggtcttgtatgatgtcattactcctattatgtattctggctccatgcccaggcagtatttggggatttattgatcatgcctgtgctcctcttagccacagtgctgttggttttaaagaagcaacccttagtttcagattgaagagccttggctcttacacatgtcctcagttagtccagttcctagctgttccccaagaacactttagctgttctgcttcttgagctacgggttcaggactgcatgacatatccagcactgtgctggagctgcttcatactggttaatgaaagcggaagacatgcatcacttctcaggtctccatttggggatgtcatgttggtcgcttgcaattagctatggaggaggtcttgacaccacagaaattgacatatgtcacaatcagagctttttaacctagggattttattgtcaaaaatttactagtgcaccattagtgttatgtaactctgcagttatacctaagggctttgtgtttttaccctgacacctctgcttacaagcagagtaactctgggcaggtaattctacccctctgagcatcagtttcagcatttgtgaaatagggataatccctcccacttgaaagaaactttttatgattaaataatagatacaaaagacttagaattgtgcttggcacagtgcgaaagatggacaaatgttaattctttcttaattactcaaccttttggagacttcggttctgactcacattctgccattatctgtgcatgaccttgggcaaatcatgccaccaacaacctggactcggttagttcatctttaaaaaagggagaaggcttagatcaactctgagattattaccatttttaatgtttgaaaactttgttgaaatgttgaaatcgtattaggatcctagacagttaagggaacaccctctacctgatcctgggctcggagaaaaggacaggccctttcctaggtcatggctgacactctagaacccttcttcttttcttttaaaacagagaatatggattattttagtccctggattcatcatttgtgcttacctgggtttaaactcattagattttgaactccctcctccctctgccccaaatccaaatgacacagcagactcctaaaagcttgctctagcctggccctgtcagactacattttcatcaaccaatttaaaatcttcctgatcccgctgatgagtgagaacatgcggtgttcaggggacataaacatgggaacgataaacactggggattactagatgcgggaaagagggagggggaaaaggtctgaaaaaccacctactaggtactatgcttattacctgggtgatggcctcagtcataccccacacctcagcatcccacaatatacctttgtcaccaacctgcacatgtgccctctgattctaaaataaatgtgaaaaagaaaatcttcctgataacaaaaatatgcccattcttttttctttttctttttttcaaacaattttttttattagctcaacttctggagaagaagaaatattctccatttccaatatagaaaatgttcttaaaataacattgcaagcatttatcttcataagctttctgaaactctgaacagatttcgttacacttttctctgtcggatatactacacttacagctcaattcaaaagtcagaggaaaggagtcaaatgtcttggttttgtccatcctgcatttaatgtgtgttgtgtagcacctgagcctctcagtgtgtctgttatgcattcttgcgactattattaatttttctgtgtaatgttggagcggcagcaccaggcactcggctccccacatgcattttatggaacacacattcagtgtatgtgctacagcccccgagctgcccacacccctgggcctgaggggaatggtgggggaggtgaccgccaaacattcgtgacataatttccaaaaaatgtccagaagtgctgcacattttctcccttcgtgaaaggcacatgtgcctcccaagccattgggttggtattcgttacacatataaacacaagggggtggtgtttgaaagcaggaaaaccatggaatttgcttctcaatcccagaagcaatcttttttgtagcacagtccaggcagcagtctgaggctattctttgtcgttccactgtagtcatattctgcaagactaagaaggagatagtcttgatttattgtatcaaatcggttaatttaatttttaaagacttttcttaaatctgtcccacgctctctaactctcctcttactgcccatgttcaggctctcatcatcttttattttttaccttatcaacttagttatttattaacttacataaataagtttctgttatttattaacttacataagtaagtgtttctgtttaagcatataatccactgagttttgacagtgtttatacccatgaaataaccactacaatcaagatagagagaatttctatcaccccaccaaagattctgtttcagtttgcaacccagctttccattcatccctaggcaattcttgatcttttttttctgtagatggtgagtcactttttatcacttttggtcactatggatttccatttagtgggaatccactgtatgatttgcatttctagaaatggaatcatatagcatgccctcttctctgtccagcttctttcactcagcataatgatttgaggcgcatctaagttgtatgcattcccttttgttgcagagtggtattccattgtatgaatatatcgcagtttattcattcagctgacaaaatacatttgagttgtttccagctctgggctattgtgaataaagctgcagtgagcattagagtacaactcattatgtgaagatagttttagttcctcttgggtaaattcctggtagtggaatagctgggtcgtaaaaggaggtataagtttaactttttaagagaccgtcagtttttcaaaggggttgtagtattttaattttccagcagtttgagtgtaccagtgtctccatatcctaacccagacctagtattgccaaccttttaaatttagccattcagtgttatagcttttagaatttgtctagtaggttttctggctttgaaagctccaaaataaaaataaaaacaaaagaaaataaattgagccatgctaggggatatagagtgctgtctcatgtggttttaatgtgcatttccttgtcaactggtgatgctgagcatcttttcttcttttcgagaatcttttcatatgctttttgccatttataagtttcatcttttgaagtgtctgttccaatctttagtccgttgttttattgagcttttagttttcttactattgagttggaagagttctttatatattctggattcgagtcctttgtcagatgtatgtgctatgaacattttctcccatcctgtgacttacttttttgttttcttaatgatgtctgttgaagatatatatatatatatatatatttttttttttttgcaatggggtcttgcacagatacccaagctggagtacagtggtgcaatcttggctcaatgcagccttgacatcctgggcttaagttatctcctacctctcagcctcctgagtagctggcactgcaggtgcatgccaccacgctcggctaatttttgtatttttagtagagatggtttcaccacgttgcccgggctggtctcgaactcctgagctcaagtgatcagcccatgtcgggttcccaaagtactgggattataggcatgagccaccatgccaggccctgttgaagagattttttatttttggttttcaattaaccatttatttcttttatgatttttgtcttttgtgtcctgagaaatatttgcctactacaaggtcacaaatatgttctcctgtgatttcccctaagaattttatggtttttacttgtttatttagttgatccattttaagttgatttttgggttttgtgtgaagcaaaggtatcaatactctttttttctacacagatgcccagttgtttacttttaatgtctctttaatttctgatattatttgtaccctctttctctccctatcttatccactctgtgtctctgtctctctttctctttctcttctttaaccagatagtgggttatcaatttttgttgattttaaaaaataattaaaatagcttttggctttggtgattttctccattgcttgtctgctttctattttattgacttttgccctgatgttcattacttccttccttctaattatttcgggattactttgctcttctttttctagcttcttgaggtagaacttaggtcattgattttagacctttcttcttttttaatataaacctttaaagctataaatgtccttctaatctctgcttcacctgcatctcacaagctttgatatactttacttttattatcttccagttcaaaatatttcctaatttcccttgagatttttctttgatttatggattatttagaggcaggttatttaatttccaaatagttgaaatttttgttgatatttttatttctaatttaatacttttatagtcagagaacacagcttgtatggttttaacttttaatttattgggacttattttatggctcagcatatagtttcaattaaatttttgtgaaaaaatatatattttgctgttgtgtatatcctacaaataccagttgggtttaggtggttgataatattgtttagataactgacatttttcttggattttgtgtaattgtcctatcaattgccgagagaaaggtgttataatcccttaccatggttttagactgtctctttctttgtttttactttgtgtattttgaaactctgttactaggtatatacacatttttgttatgtcttgatgatgaattgatctttacaatatgaaatgttggtccctacctttgtcaatactctttgtcttgatatctattttaactgatatgaatgtagccatttttaccctgttatatttactgtttacgtgctatatattattccagccacttactttcaactgatttatatctctgtatttaaagtacatctcttatagaaaatagttgggacttgcttttttatacatagttatagtctctgccatttaattggagtatgtagtttactaatatttaattatatttatatgattggatttagagctaccatttcattatttgttttctgtttgttccttctggtttgttttgcttattttgcttgcttgtttgttttgttctcctttttgccttttggattatttcaattttttaaaaataccattttaagttatccattggcatttttgctgtgtctcttttctctaatatgttggtggttactctaggtattgtagtatacatcattagctgttcactgtgcacctagagataatattgtaccatttcttttaaaatgtagaagtcttgccatgatatacgttcatttaccgctgtgcctgtggttataattttatatgtattgtatctatatacattataaaaccatgatacatgattatcatttttgctttaacaatcatatgtactttaaagaaattaagagaaactagattctttcatatatactctatttctgaaggtctgagtttctctctgatgtcatctcgcctcagcctgaagaaattttatttagaattttgtgtagtgcaggccaggtggtaaaacattctcttagtttttcttatctgaaagtaaggtttttatttcgccttcattattgaaagatatagagctctaagttgccggtttatttctcttggtactcattgtttctgggttccatggtttttaatgaaatatctgtagtgattcaaatgattatgctcctgtatataacaggttgctttcaagatttttcttcatttgtggttttcagaagtttgactgtaatgtgtttctctttgaatttatcctgtttggggtttactgagcttcttgaatttgtaaatttatgtctttaactaaatttggggagttttcagctattatgttttacagtaattttctgctttagttttcctctcctctcttcctttgactaaaaaacccgtatgttaggcttttcaaattgcttcacagttccacagtgctccatttattgttttcagtcttttgtttatctactttcaattggataatttatattaatgtattgtaaaatttactgactttttcctttaccatcttcagtcttaagtccatctagtgacttttaaaaaaaaattcaggtattgtactttcctgttctaaaattttcatttagttcttttttgtattttctattttttttactacttcattaattgtaagcatatttttctttgtctgactgatcattgttatgatggctgcattaaagtctttgtctgaaaattccaacatcatagttacatcaggattggtgtctgttgattctcttttcccttaggagtgggtactattttcccgactctttatatgtcacataattttggattataagctggacattgtgagtgctttgttgggttcttgttttaaaaggcaatgaatttagccagacccaactacatcctgcctgtctgtgatgctgatggcagatctcagttcagttctttaaacattagctgcaaacttctttcagttttctccagacatgcatggttcagtggtctaccagagacttgaactgagtctgtatacaagaatttagtgttttcccccaactctgactctcctcttttgccttctcccctactgttagtagccctggcatccttctccgggtttcttcccccagaaagatgatctttctgttaatattttactttatctctactgccaccaccatgactgtgctgctctcagggcaaatctgccagcaaaaagaaaaataataaaacacggagaatatagagaactgcttgccacatgcttcaagtttcacctcatctccaaaacttgcctgtctttgttcacttctctagagatctcattagttgtttctaatctgttattcagaatgtacagctgtgagttgcagcaggatcagtgtgttgagtgcatactcctctcactgcaagtgcagcccccactctttagctgaataattgcagtggtcttcctgctgtctttagtcttattttcctccaatccagctttcacttgggagccaggtgattaaaataaattctggtgctgaccttgctattgtaagattgatttctaacttcttgtagtggcatacatagcctttcattaataacttctacacacctgtgtaatgcaataaggtgccttttctcaacccagtgtgtttccacagttctggaatactcatcacctttgatttttcttactctctttcccttgcctaactccagaaactccaccgctgtccccattttgagtcagatgtcccctctgagttccctcttaatattctgtggatccccctataatgttacttagcacatcgttctattatttgctgctcagttatctgtattcccccaagaccgagctcctcaagggttgcaaatcatgccatatttctttaacttctaactcttccctcacctaatttcactgcctgatatatagtagatatacaataatttttctactgattgcattatattctcatgagtatacattttttatttctgtttctatgggtgtctgttgtgcacacacagagttcccatgaaatagaacaaaggatttggggtcatttgtcctccattcactgtgtatcagttgcggcatatttgctaaccttgtcttttaggccccctacctataggtattagacccagcatgctgtgaaatccttatgattaaagtctttacactaagaagggataaggcgatggtattactggagtatccagcaaaggcaggcgtcttctgcctttctctttttttataaattggagagttcagacattgctggggaagctcactgtctctttctctctctctctctgtctgcacgtgtgcgcatgcgtgcatgcgtgtgtgtgtgtgtgtgtgtgtgtgtgtgtgtgtgtgtgtgtgtgtgtgtgtgtgaatgctgatgactctccgggaataagccagcactggggatgaggtgatagattcagaacccatcgatctgtcatagcatgtcatctactaaggaatctggaaagcattctcttcctttacaccatttcttatttatcagaaaggattcattgacttttacattgtacggaacatggattttcacaagaactgatacgttgctccttggtatcaacctttcagagcgggagctactgaatgtttaacccacatcctttctttcaaaacaaatgagcttctgtctccatagaacttttaaactttcttgtgttacctagtgtcttagaatagtgcctcagcttcagctccaacttaaagaagaaaagaacaaatggtttcatttctagttatgcaaataaactgctcattgtaaaatcatttataaatttatttatttagcaaatatttatcttgtatctgctgcatgccatgctttgagcatacaaccaggaagatagatatgatcactgcttcatgaacatttagtctagcgttactgaaaaatatatagaagcactttttaaaaagcatcccagaatctcaatacgcagacataaccactgttcacttctttctgaatattttttttttggcatttttgcccttcggatttcaggcaccagcacttcgtctattttcatttcagtatcttcaacttctttgtctattttcattttggtatctcttgcttctttgtccttcatttcccccatgaggcaaatctccaattgctgagcatctaatctttaacttatgtaatgtttggctctggcccgaaagaaaaaaaacttttcagaatgtgaattttaatcccaaggagcttgttctactttatatgtgtgagattctgaattttccacacctacgaaagactaattaagttatagaggtatttcccactgttaaattaaattaacagacttgctcattttatagtttaatgaggaggtgttaaaagttgggctgtaccttatttataatggcaaaaacgtgataaatatctaaatgcccatcaataagagactagttaaataaataatgtatccatagaatggaatactattaatgagttaaaatagtttgttgacataaaaagaaaactaatatagatggaaagatagctacaacaaattagtggctgaaaaagcagattataacatagattacaatattttgttttcatttatgtaaaattggatgcacatgtctgtacatgcatagcaagccatttgtatgcattcagtcaatctatttcttcaacaactattgtgtaagtgatgctctgtaaatacattgtgatagttgcccatgtcatggggcaaaatcagataatacatataaattgtatcatgcatatttgagggggaacatatttgacttactgaaagtacctttttttctcatctccagaataatgaactacaaagcaggttggactatttaacagaaacccaggccaagactgaagtggaaaccagagagataggagtgggctgtgatcttctacccaggtatttaggaatttcctgatttttttttttattcaaattcctctttggctgaagaaaatactttactaggctgttcttagcagaattgcattcttcctatcacaaatatttctgcaaagccgagtggtggctgctgagaggcttgactggtttctgtaggaacaggggcattgtgcagggtggaggggtcagcaaaggagagacctggggaagccatttagagagagatgggccctgtcagtgagtgaatgcatttgttccttccttccttccttcattcattcaactaatgctcttagtaccttccctgtgccagacagttatgacacagagaggagtgagatttggttcctgccccagagtacagtctggagggagagacaggtatgtaggtagacatatataacggtgtgagaggggcatccgaggtgctttagtgatatacaagagggaggatctaaaccttgaacaaaagtcatctgttcctcagtactgtaacagggtattgtcaagcactggatccagttcataaatacctgatctgcttgagtcatcggcagatatgtgataactataacctggtttgttcagttacattcctgagctagaggactgacctgttcattgttaagctgcttccatgcttgcgtctcttcctggtgacattagagcctgtaacacagtaacctgcctctgataactaactcaccattcccgggtgctcacaactgtgcctggcctcaagaggacataaaacaagtttacagcaaagatgctaatgacatgtgacttgtgatttaggtaatcaaagtcacaaaatgcctggtatcgtgtgtgcaggagggtggattcttgtgtgaacaggggcacttgtgtgtgctttgctggacatagtagtctagaaaaatgtcgaatcctggaatcttgagtggttacagctggtgggaagtagtgacgagccgatcaccaagctggggtgtggaatacctggttcttgtcctaccagccagcagcaggatgccttcagacaggttcttcactggggcctcggtttctcaacttctaaagtcagtgatttgactaggtaactgctcaggcctctaccagctctaacattgtacagtaaggcctcctttccttactttattaatttttatttattactggtattgtcatttttgttaattaaaatgaatcacttgccattctcaaagaatttaccaaaagcggcattaggttctttctttgacagtgtcctcaattacattgcttgccttctagtaaaaaggcattttttatcagtccaatataattaatagaaaatgttgaatatatatatatgtatatatatgtgtatatatatatatgtatatatatatatatatatatacatatatatacatatatatagactccggatctcatcatattcagatatattttcatatatgaaaatataaccaaaaagaacgatcaattgtgtacagagacctttttgaaatttaaataatttggccgtttcccccctttttgtatttttcaaaagccaagtggcctagtccactctaattgcccacataataaatcttgtttggctaagacgggtacaaaactatgtctgaaaccaataaattgtttgttttctaattcccgcattttggcttaaaacaagcttttcaatttgtatgcccaagtatagcctgaagcaaacttttatggctaagttatgaaaccacaaagcggttttcataatggaagtgctgacagacccttaacttatggccatggtgaacttggaagccacttcagtatctaaaagcagcttttccataaatgtaacatttggtttccccccggatccatcttagcagtttaactacctaggtcaatcagcagaggaaatgaaaactacatatccgtgtttccgaaaaggcagaataatatttcattcgtttcctcgcaaatatttattaagtgcctactatgtgaaaggcgccagggaagtctgggtggggaggagcccagaatctttcggtaactcagggcagtggccttccacctgcgcttcttggaactgccttactctgagctggggctcctggagaggcttcgggatgcccggggggatgaggagggttagtgagcggctggaccgtgggacccttcttcctccccaaaacaactgagaaagtcagcttttagtttgttttgtctgttggattccaagtaagattctgtttgaataaatagctctatgggcaaaaacaaattggaactcccggtctagttaatccccatgttttatggatgccagaactggggctcagagagatcaagtgattcactggaagccacatagccagaattagaaccaggccttcttgagtcttggtgcagtacatgtgtagtttgaaaatatgtaataaatagagagctactaaatggtggtgtgtatgttctaacaaaattcctggttcatacttggacttcaaatttgcatctaactaataaaagattccatggtattgtccagaatgttttttagatttttgtttctagaatgttttagaccaatacaagcattgaattaagcctgagttatgcagaagcgttttgttctttgtccctattcttctcctacaaggaattcaccagtgtggaacagtcagggaggctcaggctgtccagttccctgcccagccagctgctagctgagctcagccttgggcaagttacttcatctctctaaagcttcaactctttcatctttaaactaagaatgaagaggataatatcaaacctcattgggttgctttgaagattaaataaaaatgtgtacataaagcatttagagactgggcatggtgggtcacacctgtattgccagcactttgggaggccaaggcgggaggatcccttgaagctaggagttcaagaccagcctaagccacatagcaggaccttatctctaccaaaaaaaaaaaaaaaaaaaaagaaaagaaataaaaaataggccaggcatggtggctcatacctgtaatcctagcactttgggaggccaaggcagtggattgcctgagctccagagttcaagatcagcctgggcaacttgatgaaaccctgtctctactaaaatacaaaaaattagccgggtgtggtggtgtgcacctgtaatcccagctactcaggaggctgagacaggagaatagcttgaacccgggaggcagaggttgcagtgagccaagatcatgcccctgcactccagcctgggcctgggcaacagaatgagaccccgtctcaaataaataaaaataaaaatgaaagcattttagcatggtaactggaccagagttaagcacttaataactaatagctattactattaatattaactaaacccaaactctgattttctatgtagaacactatataaaatacaaaaaaatctgagtatgctaagatgatttcattaactttttattggtggtaatcattgattttatgaaatggattgatagcctgatcaagtatatagtacttcagtatgcattgggctcttcagttaaactctctagacaccccgtctagacactgtgtaaaactctgggaggcccagtgattgataaggtctctgtcagctaagacctgagagtggcccctgcgtgctgtaggcatggggcacttgtcttattgtagaatagcatggcctctcctactcactcatctgtacaactgcaagtgttacatgctgtgctactgctaatagcatttttagagctgctctacttttttttttgtcttgtgtgaaaaaaaaattgcatttagttgccgggtgtggtgtctcacacctgtaatcccagtactttgggaggccgaggcgggcggatcacctgaggttgggagtttgagaccagcctgaccaacatggagaaaccccgtctctactaaaaataagaaattagccaggtgtggtgacacatgcctgtaatcccagctactcaggaagctgaggcaggagaatcacttgaacccaagaggtggaggttgtgttgagctgagatcgcaccattgtactccatcctgggcaacaagagtgaaactccgtctcaaaaaaaaatgcatttagttgatgctcaataaacatttgttgggtgaataagtgaaagatacataccaaatgaagaacataggcaggtgatcagtattatcacatgatttatttatttaataaaggccttggatgaagtcattcctgcttatgtttcacctctttgtgtgtgtgtgtgtgtgtgtgtgtgtgtgtgtgtttctctctctctctctctctgtctcctcactagaatatgagctccatgagggcagggattttcatctctttcactaattgcattctccctgggacctccttagagcaatgcttggcacatactaggcactcaatatttgttgaatggagccatctccctgtagcatttgacaatccttcctaagaagaaaggaaggattcctcagcctatttcctacccttgcaggacttttctctcctggttctccacctatctccctggtctgtccttctccagcttctctgatggcttcttttcctcctccaagaccctcccatggtagtccacatggctctatcttggttccggtactttctgcaaagattacatcaagtctcacagcttcacctctcccctctgtggctgagccacagaagtgtgaacctttctcttgaatacaagtccttgttccccacagccttctgggcacactcccagctggtgtctgcttggtcttcatacttgccgtttcatggccgagtgcgccatctctttcttcaaagtctctcctcttaggagtgagtaagaatactggcttggaagttagacctgggtttgggtcctgagtccgcctcctgctttatctgcagctttggcaaattcctaccctccttgattctcatcttgaaaaggatgattttggtggcaatccctttggaagcttgttgagaggattaagggaagtaacaggcatagaatgtccagtggaagtgccccgccttttcatatttctgtggctgcagccactgctttcccagctacctaaactcagtatattgcagtcacttctgagtcagagaattattttgctccttgactcactcactcatactgtgctgttcttttccttcatgacttgactccttctttcccattcctcttgctgccagcctgcctcagactgtctaatctactcagtaccatctctctgcctcactttctcctcctcaaattcttcccctccttcatctaatctttgttttccataaatttctagtgaccaaggatctcttcataaagagagagggaaagggaaggggtgagaggggactcactgtgggttcaggagttcacacacacacacacacacacacacacacacaaatgtatgtgtgtatttaaagactcaggagtttagtttgaaaactttgatatatgttaattaaagccattgagaacaagtgcaggtcatctagccttcatttacaaagaaaaatgaaaaaacaaaaacgaaaggaaaagtgacttttctttcttctgccctgtagtgaaacttggtttccagcaaaccagcaaacttggttttcatcaattatgtcttaataggtgcaatatgatgaaaaatattccccatggtcataagtgctcagcacgtagtaagtgctttaaaatgcttatattttcgtatttcttttgcaaagaccagaacacaaagtagctttttgtcaaagctttatttgctgattctgctattgttttccccaggggaactgcccctttattgattaataaaaggttaacaatagcctaaatgtgttaaggcaaatggttgggtttcagttttgtggttgaggttatttgtgttcttgaaatcctgttgtttcctagtgatcaacaaaataaaataccccacttcttttttaaaagatcgggatatgagagcctgtttttgaacctagaaggttcacctttataaatatttctgcattttatgggctttcaggatattgtcattggagactgtttctgttatgcagaattttcacaggagttggcacaaatagccatctggcttctgcccctggcattccactaaactgcctggtcaggtcagtggggcctcctggatcaccaggtcccatggattgctctctgtggcaggtgacactgggaccacttacttcttgaaactcctccaacctttggtttcctttgtaattcatatgtggggtaatagctctgtggctggcttctgtgagctgctggattcatggagatgacggagatgtggctttcacccttaaagaaattatacctagcagtggacacaaatgtgtagaccaacaagtgcaataagatgctatagaggcttggcgtggtggctcacgcctgtaatcccagcactttgggaggccgagttgggcggatcatttgaggccaggggttcaagaccagactggcccacccagtgaaactccgtctctactaaaaatacaaaaattaaccaggtggtcatggcacgcgcctgtaatcccagctacttgggaggctgaggcaggagaattgcttgagcctgggaggcagaggttgcattgagctgagatcgtgccactgcactccagcctgggcaagaaagagagatttggtctcaaaaaaaaaaagctatggaggtgtcagaagcctgtataatagtgatgttcaaggtgtatatggggattgggtggagaatatggagaatctcctgggggagacatgcaaagtttaaaatacaccccctgccatgctttttaatacatcctctatcacctggtgaatgactggatgtgggaagttaggggaaagggattcgactcttaggcttcatatacacattttgtcatcgtgttggttgggataaggaatgtagctatttgaaagaacccacagatcttggtggcttagcatggtaaagattaatttcccatgtcagtttaaggccgtttggtataggtttcactccacacagtctttcaggaacccaggaattcctccatctagcaaccctgcctgagctttggagtcctcctggattctccacttgtatgctctacataaaagggaagagagagagagagcgtgggggattatgtagatttttatgggttaaacctggaagtagtagaagtcatttctgcctgtttagtcacatggcccacctaatggcaagagaagctgggaaatgtagttgagttgtgtgtccaggagaaaaaagaaatgggatgtcttagtcacctaatcctgttaactataactctcaaatgtctccctaaaatctccccgccacttcccatcaagtgcttccgtcagaattcaagttgtcatgatctctctttcacctcctgaagagcaagaattttctaactgacctgccttcagaataatccttccctagtcaaccctcgatagtaccagaggaatcttgctagaataaaaatatgagcagatcatggccctccttaaaaacctgctgtagttccctgtccccttctgaactccttagccagggacatgggacccttctccaccaggcctcatcttctgccactctccattgtgaactctttgttccagtcgttccaaaggagcacatggtttgcagttccacatccacaaactgtgtgctcacccatctctgccttacacatactgccccttcttcctggagttcccatccccgctttgcccgcttgatgagtgctaggcatccttcaagattcaccttctctgtgtgaatttctagatgtgaatttcctggtggtgctaaattgttctgccctcaattttcccatcatgtgttcatgctcattttgttcaggtcatggcgggaagggaggcttgagagttaaatgaagggactgttgtggatgtttgggcaactttaagggaaataaacaagggacagtggcaggctgtggaactagcaacagtggaagctgttaccacccttgcctgaggaggcaggggagaaagctggggaagataacaagttggggagctgtagctatgggccctggtagagggatgccgccaactaccaagctgcagcctggctgggaaaggaaaaatgtcccgacctctttgtcctctcattccctgatcccctgctaccaccttgcagtaggccaaaaggaactgaatttgaagggcaaatggatgctgacttttccgggccacagagtagggtggagaaggggcagagtagggctgaatggcaaaagaagaatgcccagcacagctgttatgtctctgttatagttcctaacacagtacatgaaaattttttatgtacatatctttcccaccaggtgacaagtcccttgaatgcatgtttcatatttttctgaaccatggatgcctagtacaacctttacaggttgttaaaaataacttttttatttttaacctgtcgtagtctgttctggctgccataacaaagtaccataaactagttagcttataaacaacagaaatttttttctcacagttctgaaggctgggatgtctaagaccaaggtgccagcagatccagtgtttggcaaggacttgctttctggttcatgtatagtgtcttcttgctatgtcctcacatagcagaagggatgatgatgaatatttctggggcctctctttttttttttgagatggaatttagctcttgttgcccaggctggagtgcagtggcatgaacttggcttactgcaacctctgcctcccgggttcaagcagttcttctgcctcagcctcctgagtagctgggattacaggcatgtgccatcatgcccagctaattttgtatttttagtagagacagagtttctccatgttggtcaggctggtcacgaactcccgacttcaggtgatccccctgcctcggccttccaaagtgctgggattacaggcgtgagccaccacgctgggcctggggcctctctcataaggccactaatcccattcatgagggctccaccctcatgacctaatcacctcccaaagtccccacctcctaatacatcaccttaggggttaggatttcaaaatatgaatttgggaaaacgtaaagtccattgcagggcctgtttgtaatatttaagtgaaatattaagctgcattattgtctttttatttttaaacacttaaacaccattttctagagttgtcttaccatgtgaagcatatggggggttttgttttgtttcattttcctgacctgcattttctcatttctcagccaaacaggcaggactcgtgaaattgtgatgccttctaggaactacaccccatacacaagagtcctggagttaaccatgaagaaaactctgacttaggcactcagaggcatacactttttacagatggacaaaagctctggaaccctgtggcttcaaatcctttgggaagggtgactgttgtttcccctacacacagtgtaagccggaatgggaatcgctgaggctctgatccacttctaagacaggaaggaaagtgaaggcagagtgagcaggtaagagagggatatacaaggtcacatttcagacacccactcggcataccctgccgtactgcatcatcatttgttttctttgtagacactgaaatcctatcaggaggattccttcacaatgtattttatttgctagactttggttgggagggaaaaggacattaatttgaagtttcatgttattcatgccaggattgtttgatagagcatgaaggttttgtttacccataaaagtattagaggcagcgtttctctgatacagagaggcctgtccacaagaagcatgggcacccagccaaacttgaacctggaagggagggttcccggcctgcaggtgctctttcctcttggtcccaagcatctgtgcagggtcgtgggagccacactgagagacttgtgtgggccagacaagcttcattctgatgcgctagtcccttggtttaatttgtgccttatgctttcattggaccagctgaaatcactgtatttattcaactagtgatttttttttctttctcactttaacttaaagagaattttatatgtcttggaaatttaataatttagtgttctcagtatcaattggtgtttttgttaaacgaatgaatcatctgttcatgcatgctctactttgatattataacctatgtcacatgtgtttaataaataccatatattttgttctactaatgttgtctctctgtttcatccatgaccatgtagaaggggcagagagcagatcaggctctggaatgagtgtcaaagtcaaatcacatgatcttccagccagtacaattcatacaagcatctgtaaaccataagattgactgtgtgtgtcgggggagggtggggggcctatctgtctttttaattgctgaactttagttaatacaccatgtggaaaaagcaagataccttaatgatcacaaagtacaaaaatagattttacttttaaacctttcctcaaacctcccaccccttactgtctccacttccaaaaaaccaaagaaataaaaaagtaagaaagcaaagcaactcagttagataaatcactgtgagtcagaatcatgctaagaggaaaatgtgcatttgggagccacatttgtatttaaacactgtccgtgggaccttgggcgagtcgtcaaggctctctgaatattagtttcatcctttaaaaacctcggattatcacacctacttgataggctgacgtgagtgccacatgaggtcattcccacatagggagtgggcactgctaggcacacaggcagtgattgctgtcattctggaggttttagagcactgctgattgctggttgagtctcaccactggaggtattctagcagcaaaaaaccgtgttctgtggcagccaccaagaaggagcacttagagaaaaagctgtccttaggaccaggagatagggaagctggactcagagagaggcagagggttctgggagcccatccccctgaagaaactggtctggaagcagtttctaagtgaaatgcaatgacttaaaaaatgtcaattttaatgagaccaaggtagaaatgaaaactactctgccaatacttccacattcacttctttctctctctcttaaaacaagcaaggaaaagaaaaacttagtaattttaaatttaaaggataccagggaccattctgcagctcgggcctttgtattttaaaatatatcttcaacatatggaaaattctaaacatgatttgaactactcaagaagactattaaagagagttcctaaattgtacagactgaaaccgaaagaagctgagagataatccttccagatcctttgtcaacattgactctagtgccccccaaccctccatctaaaggactgacattcatcaacctcttcatgagcaggggtattacataaaattgggagaatgaactctaacatttcatagtaaatttatctcactgaaatggaaagcagcagtgtatgtaaagggtttttaaaaaataaaacaacatcctataatcttccaattaatatcttcattccagaccttccagaattttaaaacacacccgctccattttgtttttaaaataaatataaccctatactgagaagtggaatcatgtgatttttaagaacgtgggaacactcgagtcagctatctgagcttagtcactagtgcgcatgtgggtaagtcacaaccctgtctgagggcctgtaaaattggaactgtgagagttctttcctaatggggttggtgtgaagagtaaatgagttaatgcctgcatggttcttagaatagtgcttggcacatgataagcacttaatatatgctacctattaacattacatacttttgtagccactttttgcttactttatatatatataaatatatatatacacacactttatatagtttgctttatatatatactttatatatagtaagtttgcttactttatatatatacatataatatatatttttgcttattttatatgtatatatactttatatatgcatataatatatatgtatacaatatacataatatatattatacacatatatgtatacaatatacacatatattatacacatatatgtatacaatatacacatatatattatataatatatgtgtacaatatacacatatatattatatataatatatgtgtacaatatacacatatatattatatataatatatgtgtacaatatacacatatatattatatataatatgtgtgtacaatatacacatatatataatatgtgtgtacaatatacacatatatataatatgtgtgtacaatatacacatatatatgtgtgtacaatatacacatatatatgtgtgtacaatatacacatatatatgtgtgtacaatatacacatatatatgtgtgtacaatatacacatatatataatatgtgtgtacaatatacacatatatataatatgtgtgtacaatatacacatatataatatgtgtgtacaatatacacatatatataatatgtgtgtacaatatacacatatatataatatgtgtgtacaatatacacatatatataatatgtgtgtacaatatacacatatataatatgtgtgtacaatatacacatatataatatgtgtgtacaatatacacatatatataatatgtgtgtacaatatacacatatataatatgtgtgtacaatatacacatatataatatgtgtgtacaatatacacatatataatatgtgtgtacaatatacacatatataatatgtgtgtacaatatacacatatataatgtgtgtacaatatacacatatataaatgtgtgtacaatatacacatatataaatgtgtgtacaatatacacatatataatatgtgtgtacaatatacacatatatatgtgtgtacaatatacacatatatatgtgtgtacaatatacacatatatatgtgtgtacaatatacacatatatatgtgtgtacaatatacacatatatatgtgtgtacaatatacacatatatatgtgtgtacaatatacacatatatatgtgtgtacaatatacacatatattatgtgtgtacaatatacacatatattatgtgtgtacaatatacacatatataatatgtgtgtacaatatacacatatatataatatgtgtgtacaatatacacatatatataatatgtgtgtacaatatacacatataatataaaatatatgtgtgtacaatatacacatatatattatataaaatatatatgtgtacaatgtacacctatatactctatatgtgtacaatgtacacctatatactctatatgtgtacaatgtacacctatatactctatatgtgtacaatgtacacctatatatactctatatgtgtacaatgtgcacatatatactctatatgtgtacaatgtgcacatatatactctatatgtgtacaatgtgcacatatatactctatatgtgtacaatgtgcacatatatactctatagagtatatatatatactctatgtatattctatagaatatatatgtgtacaatgtacatatatattctatagaatatatgtgtagaatatacacatacattctatagaatatatgtgttcaatgtacacctacagaatatatgtgttcaatgtacacctacagaatatatgtgttcaatgtacacatacagaatatatgtgttcaatgtacacatacagaatatatgtgtacaatgtacacatacagaatatatgtgtacaatgtacacatacagaatatatgtgtacaatgtacacatatataatatatatgtgcacaatatacacatatataatatatgtgtacaatatacacatatatatgtataatatacacatatattatatataatatgtgtatattatacatatatgtgtatagtatacacatatatattatataatatgtgtatagtatacacatatatgtataatatacacatatatatgtataatatacacatatatatgtataatatacacatatgtattatatataatatgtgtatattatatacatgtatgttatatataatatgtgtatataattgtatataatggatataatatatactatatgtatataatataccaatagtgtatataatatatacgtatatatattatatatagtatataatatatacgtatatatattatatgcgtatatattatatacacctgtgtaatatatgcatatgttatatacgcatatgtaatatatgcatatattatatacgcgtatgtaatatatacatatatatacgtgtatataatatatcatattatatattgtatacgtacataatatatcatatataatatacgtatatatcatatataatatacatatatatatcatacattatataatatacgtatataatatatcatatattatataatataagtatatcgtatatcatatatcatatattatatatgtatataatatatcatacatgtatatattatatacgtatattatatatcatacatgtatatattatatacgtatatatcatatataatatatgatatatacgtatataatatatacatgtatgatatatgatatacgtatatcatatattatatattatatacgtatatcatatataatatatactatatcatatatatgatatagtatatattatataatatattatatataatatattcacatgcatatatatgtgtatatatataaagtatatatacatataaagtaagcaaaaagtatacatatgtattatatatagaaatatatacatatacataaagtaagcaaaaagtgtatatatactatatatataatctacaccattgcttcttataggtaattggattccattttttgatgtcccataatttatttgacccatcccttagtgttggaatcttggatgttgtcttcacttttcttcagcagtcctctgatgaaccatcttgtccacacgtttttgcacacttgactgattattttctcaggatcagttcctagaggaattgtctggtcaaaaggtgtgcacacttttggtgcctatggtccaatacggcctatggaaatttgaattcattgaaattctcactaacaggctgagaatgtgacttcctgactcttttgccaacatgaggaatgagaaacagagtgtacaacatggctttctttaggcagacctgccccccaaacaggtggtgaacaaagttccttcagcatattgcctgtggatatcagaactcagggacatgcaggtgtgagctgcgggcctggaggtgtccctagggcccagagagtgcctgggcagccgacgggaaactggatggactcagaaggagcaagtgtccctcaggatccaggaatcaaagaaggcctgccgcttagtgagccagcatcaagagcctgtcactcaggccacatgcctaagatgcggtttgactctgagtggggcatgccccctatttcagggatagcctgggagagaggatcaacatttgggaagtgcttggagggtgcaccaaccaaggctgacccctgagctggtccatgtgtccactgtgagcacccactttcttcccagtgaatgccatctgcctactccaggaactctagggtggtcaccagggcaaggagtgggggtgataggaatgggtcctggctcaagtcccactgggccatggtgctcttcttgacggccagactgagagggccagttcagttcacccagcacatgccaggtgcttggaagacaaagaaatgcacctcgagacccttgctgtctccaaaatcttttccagcaagtccaggccctcctgatctttcccatctctgaatcccaggggaacttattttcagccccttctttattcttacatctcatgaccaatctttgtgtacatttattatctctccagtgacataaactcctcaggggcagtgtcccataaggggcacactagtcatttggagggaagccattgtaaaccttgataagcatgaagaaatctacaaatgaggagtattccagaaaaagcctcggctttggggaagtaaataataccaggagttactgagctggacacagcacacatacactgagtctttacaacagtcctgcctggaagatgttatcaccaccatttcatggataaggaaattgaaactcaaaaagatgtgaaaattgtctgaaaccactcagacctgtctgatttcagaacacaggtgggaggcctggagtcagtcccaggtctgccattaaatcacaatacctccttggtcaggtcactacagcactctgcagctccgtgccccaggatgcagctttttcgatgaagtaaatggaattgcatcccccacccaggcttgctgcacagatcatggcatagcattgacaaatttcctagcagttcatcagagatatgccaataattgatacctgctactattactagtaattaccgggaagccagtattgcaccaagaatatttgcaaacccaaggatttcttcttattggacacagagattgaatgaatgctagcgaatggaattgtgcagaagacaaacaggagtgagggaaatgctactggataagcaggaggttaaataaactgtatctccttttgtttagatgtgaatttaagaataatctattttactttgtcagggaaggaaaggcctaaaagggagactaaagatgagttgctaaaaaagagagaacagaagcaaagagaccagaaggtgagtgctgctaaagcttggggtaattcgttaggcaggattagataactaatacatggtgtgaaaaatatcgttgcattttgtttttgcatgcaaatatctaattgttttagcactatttgttgaaaagactacccattttccactgaattgcccttgtaccattgttgaaaataaattggccatatatgcataaatctatttctatactctctatactgttatattgggatctagttgcttatcttgacactaatactatgctgtcttgtttgctgtagctttatcatcggccatgaagtcaggtagcacaggctctctaattatatttttctaagttgattgggctattctaggtcctttgcatttctatatgaattttacagtctgtcaatttccacaaaagcgctattgggattttccttgggactgcattgaatagacaggtcaccaaggataacatcaagaccttgctgtgtcaggccagctcctagcaacactgcagcccaagttgggagcactaggttggctcctggatgtcagtgactgctcttctcttccttagctggaaaggtactgggaaaaacctccatagtgtattttggtaaaggtatagtataatctttgtgggattccgaacaaaatattataagaaacattcatttgtgcccaagggccataaacttggtgtaatctgaatgcaataaattataaataaatggcaaacagttcttgatggttttctcttaatttttcaagttttaacatagagcgtttacaggattcaccttcctgatttagggatgggaggggggttgagaaataattagtaggcaattttttggccctgggacttttcttgtaaatgttttctttggcagccatactcttgagaacaggaagttactctcttgttacagatttaagacttttctgagccaaataacagaaagctggattagttctgaaatgaagtggggggaaaaaaaacaactctaggctcttgctggagattaatgacatcttacaaatattttaattctcccctttcctcttaacttgctacctcctaaacaaaacacactcagactgaaaaaaaaaaaaaaacaaaaaacttaactgatcactttgtagcccaaccttaaaataaaatatctttatggtgcccacaaatttatgtaaacatttttggggtgttaaagggaaggaaaatagggctgtcttaagtcgatcctttttttgttacaaaatccccaatatgaaatttagagcataaaatgtagttgtaaagatgctaatttttctatgataatcacacagattcataattttctttgatctttttaaaatggcttttaaaaatagataaaagtgtttaatcaagctttgaaaactatgcctatatgttgtttgagatggttgcaaacaattctttagaaattgttccaaatgacaggattatatcctttgactagagcatctctgactataaaacaaaggaattatttcctccaaaaagactgagtcctcacagaagggcatgctgaggtagaaataaaaaaaaattaaatttttacacttgattctaaaaaaaagttgtaatcttaatgaagttcataatctggaggaacattaattccgtgaattatctgagaactatttgtgaggattgtttttaaaattgctttaaatgtaaaagtttttattttttgcaaggattcttaaaacacagaaggccttataaaaactttgagattgagaagtaaagaacgctttcctgtaacaagtatatatcttctactagtaatctaggaagtttctatggtattaattgcagcctcagaaaataaaagagttggtctaagtgttttatttgcacttgcctcctgcacccaaattcaaatgccctggtacccaagaagtttgcctatagttgagaagggtaggataatagggccagtagctgatgggagcaggggaggatgcttccctgggctataagaacatgcctatcctaaagtcactcaaattcctaagtctgaaaaacactgtgctgccaaacacacccatctgtaatttgaatgtggccaaagacccacaatttgccacccttgacttgcattatctaatgtttttctttctgtatattatgaagaggatatttattccttcatactaactttcttcagtctgcttgaggtgatgcccttccacatcattcataatagtttcttgtcttctactattattgacaacttcacttttttaaccttataaacaattttaaattactcggagctgtcatccattagatataaaaattaaatggagcccaggaattctaggtgatgggaaacattatccagggctgtaagacatgcacaactatgggagtccagcaaaggctgataagcctggagctccagcaatgttgggtgagcatttatttaaagggagctacttgcttcctggtttgactgcataccaaatatatcttctcaacatttatgagcttaaatagatgcagatgttgccagagagtgtattgtaacattcatcatcctagaatcatataatttaagtgttgagaggcatcttggacttcggttcaatactctcattttaagcaggaggaagctgaggttcagaagagttaactgacttgccacaaagttagtggtccacaaaccctgccccataaaaacattgttgagggttgacaaattttactaccaccacctccgttctctcatctggattgctttaattgtcctatacactatgcttgactattatctcctcccaattttcaagaagaaaattaatgagaatttttttttcctgaataattcttctttatatttcgtgggcatcccttacttctctccatctccccactgttgatgattttcagagctgtgttctttctcatgtaagatggaaattaaaggtgaccagacactgattttggccaggtctagtgagaggagaggggttagtttgttttctctaactctagcctgctgctgatcactagtttatttatttcatggcctctgatggacatcagactccaaatagtgagagccatggtgtgctgacactgtagcagaaatcagttctttccatccactaaaaagacaactacctccttggtgaaacctgaaatgatcttatgaaatctcatcctgtagtgactttgcaaattacctcactcctccttttctgttttctcataaatatatgtgcagactgtctttcctcaaccacaaaggaagtgtaaacatagtttatctgatgttttatgaattaaataatttctatagccagacttatatgatgtacttgatgttttatgaaaaatcttcagtgaggcccatttaagtgtaggacagtctgccctccagcatagaatttgaaccaattctaagcaaagtttggctgttatatcctcctactttcctgccctacatactctccaaatcctagagatgagtactctggggtcttcctattatcctaaactcactgatgtaatagtctgtctggtgtgttcttcttctcagattactcaaaattctctccattttctccctttccctcctgaacaaatttcactctttgggtttaggtcatcatctcagctaggctgttatgaagaagcattttggaactaaataatactcacgtgtaaatgactaatagatcatttatgttctcaaaggaagatctttgttcaccatataatcttcttattggtggaatttcactcaatgtgtcaaagggaaggaaaataagtcaaggagaggggaaggtatttttaatcttgtttaagattttatgtcttaaactgagaggaggggccttagctacaatgtctatatagtctgtgtcaaagaccgtgtgctctttcaaggatttttttcccagtttgtgagttttttcatatttaaaaatcttacaaagttttattattcaatcacaattcagttggtcacatatctaaccagcaatcttcattaaatttattaaaaagtaaacttacatgaaatttcagagtaccaaacatttaataatttaaaaaactatgtcttcccacactatcaagatcataaaacacagtggtggcctgaaatgggacattcgtcactaaaaaacacttcagccatgtgacggtattaacagaaaagggttcttttccaccaacttgaacctcacttggctgagattttctcaccacagtctttgtatttttttttcccatgggcaactgcccccttgattaatcccatttcccttagtcctagtttttccaggcagctgagcaaacaaagatgcaggcagccattttaacgtgcttcctccctcaagccctctgggatgggccgtctgttcatcctgttcataaaccaacggcctgaatgggcttggagaaagcagcaaggatcttctgtcaggattaattttaataggccatagtctgtcacccgggaaccatagcccaggcaaatggctttaaattactatttgctgataaaaagggagatatgagctgaaaatttggttcctcatttaaaacaacttggataactaatgcaagaatttacttttagtgtggagtgcaggtactttacagcctaaacccttgggtagctgaggaaaatcttttgttgccatgggatcacagtgaaatataaagaggggaaatgtggcagtttgtagaagtatagaattttagagctggaagggaaataaaaaatgtatctgtgacttcctaaggacttacgtttagagctttatatttctgatttctgtgcagagaaacgcgattcctcttattgccccttctacttttttgtctccctctttaccaattcctttctctttcctttttttcactgtttttctcatacccaattccagttccttgttccttcccttggttcctcatccctcaccagccaggctcctgtcatttctctgtgaagctctgcactggggggcacatgaggtagcgtggtgaatgtagcccctaggcaaacaagtcaggaggccctagctcttgtctcttcccttgtaaagtgtgagaaggcagtttgggggactgactggaagggatggttttgtaaaatgacacactgatgtcagccattattgttcaataaagtcctctgtgtaccattcataagtaatttttttattagctatggccattgttttggtttgtttaaaaattcagaatgtggctgggcatggaggcttacatctgtcatctcagcactttgggaggccaagatgggaggatcatatgagcccaggagttccagaccagccctgggcaatatagccagaccccatctctccacacacacacacacacacacacacacacacacaaatcagctgggcatggtggtgcacaccagtagtcccagctacttgggaggttgaagcaggagtaacctttgagcccaggagtttgagactgcagtgagctatgattgtgccactgcacttcagcctgggtgacagagggagactctttctcaaaaaagagaaaaaaatcagtgtgttccatactcaaatggatgcttccaagaaaaatcatggaagaaaatagaatttgcttcatacttctttatgacccttggttcccatctcttcctttccagccagctcccctcaactctcatagatcatatcacttgttcatggagaaaatgttctccacattcctttacaaacatgactgataccataaaaaatgtttggtgcaagttctgtaatctttcttaaatagcccagcctgggcacttgagcaagaaggctggtggctaaaattaaacaaaacataacaaaaccaaaaacaggctgggcgcgatggctcacgcctgtaatcccagcactctgggaggatgaggcgggcagatcccttgaggccaggagtttaagaccagcctggccaacatggcaaaaacctgtctctactaaaaatacaaaagattagccaggggtggtggtgcgcgcctatagtcctagctactcgggaggctgaggcaggagaatcgcttaaacccgggaagtggaggttgcagtgagccaagatcatgccactgcactccagactgggtgacagagcaagactacatctcgaaagaaaaaaaaatgcaaagaacaaaaacaaaacccaagtgtcaatgaagatgttgagcaacttcattgctgatagagtgcaaaatggtatagatactttgtaaacaatttggtagattcttagaaacattcatttaccctatgacctagttatcccactcccaagtgaaatggaagcttatgttcatgcaaaaacctatacacaaggtttatagtgacttgattcataatcagcaataacttaaagcaaataaatacctttcaactgtttaatgtataagtaaactcctacaatggactactatacccatagaatacaacactacttagcaataaaaaggatcaggttactgatacctgcagtggcataaatgaatctcaaaaccattatgctaagagaaagaaggcagattcaaaaggctactgtatgattctacttatatgacattctggaaaaggcaaaactctaggacagaagacaaaccagtagttgccagggataggggttcagtggagaggctgactacattttggggggcatgatagaactgttctatatcatgattatggtggtcatcacaaaactgtatgcatttgtcaaaactcagacctgtacactaaaaagggggaattttactacatgtaaactatatcaataaatctgacaaagaaaagaaatatacagtattaatttgcatgttattcattttaaaataaatggtattgttctgcaacttgcttttttcacttaaccttaagttttggagattaaaccttgttgaaatctgtagatttagttccttcattttaattgacgtagttttcaatttttgctaccactataaacaatgtggcaatgaatgttctgacacacgtcttctttagtacatacaccgagtttccttaggaaggctagtacataaatgctgtgtgttggattgcagagtaggcacgtcttccagtttactagatgtgactgcatatctttcctaagtgtttctgccagttcagtctctgtaacacatgagctcctgtttctccaatcagaaagagtttggaatttttaagatttttttactttgcatttccctgaagttgaggatccttttttaaagcatgttttctggtttttccagtttcctcttctgtgaactgttcgtatttttcctttttttttttctgacttgttttgcttattgatgtataagaattctttttgtaaagtgtgagtttttgtattctggatgccagcttgctgtttatatgtataatagcctttacccttctacactacagaagtttttgccttaatgtagttaatttacaaattatttcctgtaaagtttgtaaaatgtgtcttaagaaatccttcctaaacttgtgatcattgaaatgtttttctgtaaatattatttttcaattttaaatagtagtttgttaattcctctggaattaatcctcatgtctattggaagtaggaaactatttatattaatactttttcccatatacacaaccaatctctctagcactatttatgaaaattcactctttcctcactaatcttaaatctcaaatcaagttcccatatatgcatgggtctatttcggtgttctctattttgttccattggtctatttgctgcaacaattatataaaattaataaaatgtaattaaaaggccaggcacacagtagggccaaagcaaaagctagcttcccccactcctcagtcagctctctaaccctaaagtctggtcatcagtgaagtcttggtttttctaaaagaatgatgctgtttggctcccttgttggtgatctttattcccactgacttcatctggtccaaatctctggccagcctctcctttaaattcccttttggtactagctccccactaatcatcaatctgctgcctgcatacccccaacttggcccagtgtcactatggccaagtctaggcatagaggctggacatgcttctgcattgccccataacacccccaccccctcattctccagcaatccccatgtggcggtcgggccatttctcatgctgagaggcccaacaagtgtgaagttgaacactttcagtctttgtacattgacactaatgtatcccacattagtaatccaagtgaaggaagcaaaattaaatttcttaaagaaaaaaaggctgggtgtggtggctcatgcctgtaatctcagcagtttgggaggctgaggcgggcagatcgcttgaacctaggagttcaagtctagcatcggcaacatggcaaaaccctgtccctacaaaaaaattaaaaaaaaatttagcggggcgtgggacacacacctgtagtcccagctacgtgggagggaggctgaggtgggaggattgtttgagccaagaaggctgaggttacagtgtgccgacattataccactgcactccagcctgtgcaacagagcaagacccgtctcaaaaaagaaaaaaaaggtcagaatttaagagaggaagagagggtcgaaggagggaaatacaaattcagttttggacaggttgagactgagaaacctttgagacattcaggtggtaaggcctttaccctgactctaattctagtcccagagcaaaaccccaaaagactcctgtgcttaaaagcctggagagattggtaccttggaatttatggtaagagagagttttaagagggagaaactgctcaacagggtcagatgctgtgagaaggggaaggactaagacatattccttgaatctgacagccatgaagggatccatggtgcttgcaagatggtgaagaaatggagtcagagaatgtggacaattcttttaggacgcgtatctctgaaaaaagaaggcaggtggaagctgggggcagcttttaactgctttattggggtataactgacgtgctatacactggacatatttaaagtatacagcgcaataagttttttttaattttctctttttatctctagaagtaagttttgacttatcaaatgattacacccatataaccatcaccgcaattaaggtattgagcatccccgtcactcccaaatgtttcctcctgcccctttgtcatccttcctcccagcctctccctgacaccccacaacatccgataatcactgatctgctttctatcactatagatgcgttcgtattttttacaattttatataaatggagtcatacggtgtgtaattttttcctggcctctttctcagtatactcgagattcatcagagttgttgcatgtaccagagtattcgatcatatgcacagactacaacgtgtttatccacttacctactaatggattgtgtcaagttttgggctattacaaataaagctgcaatgacacttatgtgcaagcctttctattaatatatgctttcatttacctgtttctcttaggtaaatacctagcagaagaatggctgggtcaaacggtatattttaagaaactgccaaactggtttccaaagaggttgtactattttgcattcccattagcagtgtatcaaagttccagttgctctacatcctttacaacacttggaatggtcagtctttctggtaggcatgtactaatatctcattgtgattttattatttattttttcttggatatagagtcttgctatggtgcccaggctggtcttgaacttctgggctgaagcaatccttccacctcagcctcctgagtagatgagattacaggcatgagccaccatgcccagcttctccatgtatttttaatttgcattttcctaatggctaataacactggtcttctttcatgtgcttatttttcacttatatatcttctttggtaaactgtcttttcaaatcttttattccctaatctggaaagtggtgcccatcacttctaccatatttattagaagtgagtcagttaagtccagtcaacattccatgggagaggattacattggagtgggacactgggggccatcctagaggctgtctaccacgtgtggcttcccatttcttttagggtaaaatccaaactccatatcctggtctacaaagccctgctagatctagccccagccttccacattgcttttttttgttatttgaacatgctaagctccttctccttttacggccttagtatcttctcttgcctctacttgggatgtttttccatcagattttcccacagttgatcatttgtcatttgaagtcccagcttaaaagttacctcctcagaaaacccaacctcagtcacccaatcaaagtagtctaccagtcactccttatcaaatcactctgtactaattctctatgtgactcttagtactgatagaataaaagtttcaatgtaacaggaaatttctttacctcattcatcgttatatcaccaaatcctagaatagcgtttcacttgtgatagacgctcaataaatatttacttactgaacaaatgaatgagatctccaaagaagcaagaacagatgggatccatagtatagctgaagggattaaccttggataaagttcctgtgactactgctgtttaataaacgaccccaaatttagaaaaggcatagtgaagatgtctctgctccacaatgtctgaggcttcaatttggatgtcgtgaaggctggaagtgactggacagttggggctgaaattatccaaagttttgctcactcacatgtctggtggttgatgctacctgttggctgaaacttcagcttgggatgatagccaaaacatctacgcaaatgcagacttcttcatggcttgcttgctgagttccaagagtaagcacttcaagaaagctaggtagaagttgcatcaccttttgtcatctagactagaaaaatcacttttgctctagttataagcacgcccagattcaaggatagagaagaataaccccatttcttgacaggaggagtgttaaactcacatagcaagaagaacacatttaggatgggaaatattgttgctgccattctggtcaactccaactatatcatggccagttttgtggccattcatgccccaacaatgacaatcaaagcaagaaaacagaggagaacagcctggaaattctaaacatttatgtttatcagttttacaattgattgtcagtttttatcttcaactaggtaaggacaagtggaaatcattcccaggtcttgtttttgttcagtgtccttgtgtagcttcgtggcagtgggatgtctataggtcatcttggcagcacctcacgtgactaatgaaattttcctttcccttaattctgttttgaattttccttcctttcaaacgcagccaaatttattagtttactctgagagcaacattcaggagattaatccaagtaccactggaaaagtgattcatctttttaatgagcactgaaaaacacaaacaaaaaaaccccaaaacacttgcccagattcatttttataacggatgggctctttgacaggcaactggaattctttagcagagattagctgtctgtggtttgtgggctccatttcctttcaagtgtttggttcagctgcaaacaggtataacctgtagcactcattgtttctctctttagtcttcatttctccattgttaaatttctccattttatatcttcttctctagacactgctgtgaaaatttgtgtcctagatatttattttttgtttcataaattataaaagaatactttgcctattttccttttgaagtgtaaataggctgcaagtagtctgcttctgttgtagagtgatgttttccacttgccatgcttcctggttactgacaaaattagacagtttgtgcttggatgctggtgggaatttagatctgtattatgatatcttgaagccctaagccatactgtataaaagattctatcccaaaccactgaaaaatctacacagtaatgatgattaattatataaaaagcttaagatttgcatataagaaacatttcattaagagaaagaggaatatgggggaaaggtagagaaaaaaatatgagagaaggagattgtgtcaattactacatgctatgttcctgagaggagacagaaaaagtacaattatagctccctcacagaaaggactttacaattttgttaggaaaggaaaaagaaatctcgatgcataacacaattagagaagtataatatgcttcatgcagtgaggttccaactttaactaagccctataattgtgctgaaaagaaagagaagtttggtttggaataacatgggaaggttcagggaggaggtgagacttcagccaagacttacaattggcaaggggagaagagatagccttccacaaaagggtaacagaagggggcaaaattctgaggcctaaaagaaaggcatccttgccttggggacacctgtggcctacaatcagcacatggggagttcactactgtgggagaaataaaggcctccagctggggtccaggggtggggtgagggaggcttgcggggtgcttatcactgtaaaccaaaaataaaatttgaaggtccgccctcaaccgtctgaatggacttcctcctgtagtccagggtcctccaaatttaacctaaaagactggcttaggccatgatgggaagctgaggtcagacatgcctcattatgcccttctttcttttagaatccaggaaaagctacacagcatttaatatcaacacatataccttgagtctgataagaaacacaacttactttctctgaagcctgctaactggaggcttcatctgcatgataaaatttcggtctccacaagttcttatgctaacctagacattcctttaaatcaattaccaatcagaaaaaaacttaaatttacctataacttgggagcccatcttgccccacacccgctctgctttgagttgtcccacctttgtggattaagccaatgtttatcttaaatgtatttgattgatgtctcatgtctccctaaaatgtataaaaccaagctgtgcaccaaccaccttaggcacgtgttctcaggatctcctgagggctgtgtcacgggccatggtcactcatatttggcacagaatacatctcttcaacattttacggagtcttttttttttttttttgtcagtaccacagacaaccacctgactcgaggaccttacctatttctcattcagccaatgctgcagcacgttattaacgtccttgaaagcaagtcttatacagagaaaacttattttgatatattaatgaatctgatcagaatggaccagattggggggatagataaatggttgcaattgtgctccctggaatagctttggagtttacctagatcttctgtctctttaggacagagctgcttgtgtttatatagcatcttacacaggattgagacaacttcaatttcctatatcaaaaaatcgggggagggcggtgggttatgggggtgttcaaacctcccaagtgacatctgctgtgactgcatgtcttcctactctttccactgggatgcacctctggtagctgaactataacgagaaggtaaaagctgtgtccaatacctattaagctgccttcttctcaacagctggggaggtggcgggggtgggggggggcggagggaagtcttttcaacagttttacacatttggaaataggcctaaagtgaagaaggggattttcaaattggtgtgttggaaaaggggctgggcttttgagtttgaaatctggtgctgtcacttactggttttgtgccctgggaatatttatttcagttttcatgcctctgtttttctataggcaaagtagaaaattcgaaaaggtcctcaacgagtttgtacagctgctcccactccctcatcacctcttgtgggcctttggaaatgtatgttggaggagacattttggattgttgcaatgacttgggagtgccatagcacctagcaggcagaagccagaaacaccaaatgtcttaacaatgcttgaggcggtgctacaaatgaagtccttctccaaatgcattgagccccaagaaaaatcgctgattctgaggaaccttccaactttaacaatttcaggacgtccctaagctgagctaggaggcaccacgcacaggccggaggcaccacgcacaggccagagtctcccaaatcctgtcccgcactctctcccaccttattaatggccagctcatctttcaagtttcgacttgaaccacttctcagagatatcttcccaggtgcccatcccaacgttactattatatcataatttgattctccctccccccatccccccgccaactctgtaaaccccaagtataacacaggacgttgctatttgttgactgacacatagtgcttggtgaggtcacgctggcgctgaatactttttgtataaaccgacgaacagctgatgaccgcatgaatgctcacacaaggggaaagggcgccaagccaaggagccggcgtcatccgacgtaacttccgccctttaacgctcctgcggacgcccccttctcccagtccgtgtttgtttccggaatttcaataaagctcgattcggctcgaagaagaccccgttcttccgggaaaatggcgactcccgctcgtgccccggagtcaccgccgtccgcggatccggcgctagtagcggggcctgccgaggaagccgagtgcccgccgccgcgccagcctcagcccgcgcagaatgtgctcgctgccccgcggcttcgagccccaagctcccgaggacttggcgcagcggagtttggtggagctgcgggaaatgttgaagcgccaggagagacttttgcgcaacgagtaagctggggtcccgcggagtctccgccaggctccttcagctcgagctccctgggcgctcccctcccctcccgcactctgttcccttccctggaaggtgactttgactcagtcacattcgcttcagtcctacgggcgagtggacggagggcttgctgcggcagagccgtgcctcttcctggccaggcacgtatgcctgcgaggatagctcggattgaacggctacctggcgttgcagggagttagtagcccctggtcggttttatttacccggggactgtggtggttccatgagtctgctttctaaacccttttgtcgcccgcacccctaacccataacagattgtcagcttcatctctggattctaagcttacaggaaccgtaggaaatgggaagagtgggatatgaagaggggtttattaggccgggaaagttcgaccctcattcagctggctggttgaacggattttagcaagggagccacgtaataaaagtgattttgttttttaggcagctttgttcagcagcttgttgcaaaagatggtttgaaggaataaaaagcagaagacagtagaaggatattttcagagagacttcccacgagacacttgtaagaaagtgagctaggaagggattgggagaacttttaagcatggactaatttaaatgcagttgacagagatggctgaagtttccaatctatatggaagaccactagcaaaaataggaaaattcagggagaggaatagatccaaggttgattttacttagggtgtgcagagttgagaggagagcaggacagacatttggttaatcgaaaaccaaacacttaaaagctggagaagtagtcatgaggctcaagaaagagagaaccctggaaaaatacagaaaacaggaatttcagctgtagagtgttgttaatagttgaaattgtggggatgaatgtagtgtcaaaaagaacagaggacttaaggtgtaattttttctttccatttattgtatagttaaagaaaagggaatcagaaaaggaactctgtcatccagcaaaagggacaaataaataattggttgggatcaagacatgtgttttgaccttgtgagaataggttttgaatgtatagcagtgaattaactttttggtctcaggactccgttatactttaagaattattgacatcccaaagagctattttatgtgttgtatctagcgaaatgtatttacttatcagaaatacgtctgaagtctttaaaacataagcatacacaagcacacattctattctagaacaatgatgtcatcacatgccatgtagcctctggaaaactccactgtacccatgcgagaaaatgagagggaaataatatcttagtattattatgaaagtagttttgacctaataggcccatccccacactccaccccatccccaaattttggagattgcactttaatgactgctggttcttggaatgtcttatgtgattattatatgcttaaaatacttttgctgaaattctaatttgctgagacaaatgaggcatatattccctattcttcctgcattcccttgttttttgggctatttggataatgaccattttaattgttttattcttgttttggggcagttagaaatcagatatttgacttaaaaatcagcttttctttctttgaagataatgccttgcctttttaatgttatatctcaagttaaaaaaatggctgtaatgtaatagtattcttttccatttgacagaaaattcatttgcaaattgcccgacaaaggtaaaaagatctttgactcttttgccaaactgaaagctgccattgcagaatgtgaagaagttagaagaaaaagtgaactgtttaaccctgttagtttagactgtaagctaaggcaaaaagcaattgcagaagttgatgtgggtacagataaggcccagaattctgacccgatacttgatacttcatcactagttcctggatgttcctctgtagataacatcaagtcatctcaaacctcacaaaaccagggacttggacgtcctactcttgaaggtgatgaagagacttcagaggttgagtacacagtgaataagggcccagcttccagcaatagagacagggtaccaccttcatctgaagctagtgagcatcacccgcggcatcgtgtttcaagtcaagcggaagatacttccagcagctttgacaacctgtttattgacaggttacagaggatcaccattgcggaccaaggtgaacaacagtcagaagaaaacgcaagtactaagaacttgacaggcctttccagtgggactgagaagaaacctcattacatggaagtgctagaaatgcgagccaaaaacccagtgccccagctgcgtaaatttaaaaccaatgtgtaagtaccctcggaaacaggcctgtaacaggaacgtgatatttgttaaactcaaaaatttacgagaaactgggtgtggtggtgcttgcctgtagtcccaggctactcaggaggctgaggtgggaagacagctttgagtccaggagttgtagaccagcttgggcaatataataagaccttttctcttaaataagtcaggagaatgctctaagttccgtgggctttgtatgagaactacttgtagttaggaaataacatgttgtggcaacactgagaccagcctggccggagtagaagattcatgttgaaaaatatttagttttgaaaccaaataatcgacaaggtcttttaaagcacatgggggagtgttaaattttaggatgcttagccagtatttcataataaacacagagttggagagaatttattatgacttctttttttcagaaccattttttagtgtacagctttgattagtgtactatcaaagtgtactctctttgattagtctgtgaactaagggtaaagcaattgcaggagctgatgggctttccagcagaaattatttgcatgctcactgtatgtaagcaagcagcaggtgttgtggggacacaattaagtcaagattcttaaaactcctttgccttttttgatgttaaatctcaagtttaaaaacatggctgtaatgtatacatgtgtaatgtaatacaataccatgttcttcaaggagtttaagagctacatgaggacccaaggtttacacacttggaaaagagttaagctacataataataacagtttcagggggaaggaagctgagaagaggtttgaaaaactgtgaaaatagattcaggcaggataggcaaaaactctgcttatcagttccttgccataaatttgtttctgaaatttcaggaaaagtaaaatctttttgaaaataattgctatttacttgcagcaaatgtaacattcaactcaggtaactggtaccttcttcctatattgtatttacaagtatgtaacatcaaagttaaatcactactacctttctttgaaaaacagaaaacctctagtgaaaagtatctaaaacatgcttcttttttgttagactttaattctaccccagcattcattttaacctcaaaacattttatttctgctgtatagaaaatcaggattatactacattaacgtgatcaagtactctcttgtgtacagtggggtatctttcttcacttccaggatgacattttagaaaactagaaccatcatctagtcaataaataaaacaaagaatacattaatcccagttctgtattatggtcatttagctgggagtgggagagaggtaagggaatagtgaagagggctaccaagaattcaggaagtttaagagacagggagcctcctgtataagttagaggagaacaggaaaggcagggctttgaggagtccttaggccatagacaggtagggattgagagggttccgtgtgagaggtggcttggaggttggaaggtggggtcaggtagtgtcctttgggtcctttctgctcttccttctgcatactcttctggcttcatgtatcacctggatgctggaggctgacccctgtgcacctctatcccagatcttcccagaactttaggtttgcatagccaattaaccatgaaacttgatcacttgggtgttcccaggtacctcagcttaatgatgtacaaagtggaactgcagtttctttccaaggtgatttccatattccctaatagtgccaccaccttctcggttttcttcccctaaggtatcttcgatttttctcatctccatatctgctagccatgaagacctacttatttctttgatcttcatctctataattgttcttcatcttctgtcgaagtgaagactctcatctctctcgggctgtaattgtggccccttctacctctagtcttaactaccagtctatctccactgctgccagagtgaaatttgtaagatggaaatccgaacttgttacggagaactcttcattgcagtctgggcctaggctacttcccagccctctttctcgctgtcttttctgtgtagccagaaaagctgagtctgtctaccttctgtactttctctcactccccttgctgggatgcacttctctccttatttacatgggtaagcagttattattccaagactgttcaaagcttttttgaaacttttcttagcctccctgtctcccactagaactggccatttccttatgttccaatgtatcttgttgagatatctatcacagtatctctggtattgtattgcactgaaactttacatgtgtatttctttctactgggcaataagcccttttgcaaatgttctttgaataaatgaaaaaaaaaaaaaaaactccagatgaaatacaaggtttgaataaggaaggaaaaggcaaagagcctgtatgcacacaaacacacccctatttgttagagcaatgaatactggtaaattacttactgttacctttggaggagaattaattgctaaggtaaaggccatttgtgtgaatgttttaaatgtgtctacaaataaaataatctgattgtataacacaagttttcctttcatcaggttaccttttcgacaaaatgattcatctagtcattgccagaagagtgggtctcctatttcctcagaagagcggcggcgcagggataagcagcatcttgatgacatcacagcagctcggcttctaccacttcaccatatgcccacgcagctgctctccatagaagaatccttggcacttcagaaacagcagaaacagaattatgaggtatttagagtattttttttcttgtctgtttgttgggtgctgcttacataagctagaatttactccaggttcaaggaggaaggaatggaatagaggggattaggtgcttccatgagctcagatctatgccactagttttcagagagtcacaaagttgctagaactgcaggaagtagctagagatgatcacagctaccttcaacattaaagtggtgatttgcctggagatgtggggagacttgtagaatttcatgtcttaaagctcatttacctgcctgttcctgttaggatagtagtagcatcgcatctctccctttcaccttgtaaaactcatgtgacagcttctcagtggcggactcaaacccagaccccttgttagagaatgaggagaatgtagttcccaggcttccatcttctgcagtacaggggagggcatagaaggagtgggaggataatgttgtgtagccagcagacagtgagacactgctttagagcataatctgcaggcccatgtgaagagagaaatatctcctgcttttggcagcttaatcaattttgcatagcactttgtttccatgtgttttgcattgaacttcaaacatgtatgttgagagtttgtatacagaataatgggatgggagaaaataagtgtgaaggaccataggggaacagaaaagtttagaagtatttagtaataattttagcctccaggagaacagtatcctgtctcacttcctaggtattgattagctagattttagtcaggtactagtgcaccaactagtataacaccagactgttcaggagttcgagaccagcgtgggcaacatagctagactccatctttaccaaaaaattagccgggcattggggcatgcaactgtggttccagctacctgtggggctgaggtaggaggattgcttgagctcaggaggtcgaggctgcagtgagccgcagtcacaccactgcactctgtatagcctgggtgacagagtgagaccctgtctcaaaaaaaaaaacaacaaaacaggctgttaatctgctttggcttttcataaaagccttggcatggattggcattatcaaggtgctctttttgaaaaaaaccatttttctttcagtgcattaaaatgactgtctagttatggctgtagcattgaggaagtgtttactgtctctgagctcttaaatgcctgtcctaagatatttttaggttgaattaaacccttcatctttaaattgtttttttttagcagagaagttgtagtggtaatagctcccacttttactgacccatattcatggcttgaagaggaggacatcaagaagttcaagaaagcatgagaaaagggaagaactgaattaggaatgacattgccacctaccatcagttggtggtaaagtccttgggagtttttaagtacattgccagtgtctgaaatttacttggactttttattggatactagttgctgtaggactttatttggagaggaatagtcagctttttagtattaatttcttgattttcattttgccattgaaatgtaattcccaagtctggaagtcatgattgtaattagggaagaaggtcctgtcagttgtagaaatctagacagcattagtccttctttttttttttttttttttttttttttttttttttttttgagacggagtcttgttctgtcacccaggctggagttcagtggcgcagtctcagctcactgcaagctccgcctcccgggttcacgccattcttgttcattcttgtgaacccgggaacacgccgggttcacaggcacccgccaccacgcccggctaattttttgtatatttagtagagacggggattcatcgtgttagccaggatggtctcgatctcctgacctcgtgatccgcctgcctcagcttcccaaagtgctgggattacaggcgtgagccactgcaccgggccccagcattagtcatttttgacatttgataggtcaaattgttatgtgagtgtgtatacatgtgcatgtgcccccatatttaacgcatctgtatttataagtattgtagtgctaagctcattactcagtttcttatatagaggagtgtatttcagtgcaatgttgtatattaatggaggtcagtaacttcaactgtagcaggctggtggctgtcagaagcattacccagttgtgtctgatagggcacagccatcaggcttgtattgcccaagggagcactcagtgaggtgtcagtgtccctcttattgctgattctaggtaacttcccattgaaaaattgtaaggaagagatgtgaacgtgtaactttgtgctttgctctttgttttaaaggagatgcaagcaaagctcgcagcgcaaaaattagctgaaagactgaatattaaaatgcggagttataatccagaaggggagtcttcagggagataccgagaagtaagggatgaagatgacgattggtcctctgatgaattctgaagataatctcctaaatcactgacgttgagatgtcatcatcttacatcagactttctaactagtatcaagatcagtgtcagatattgttgagggaagtaattttataaagttacacaaaggtagttataaaaaaagcccagtttgtctttcagaaggtgactttcatgtgcttgaaaagtttaatatttgaatattgtgtttaaccacatggtattaaaattttgcaatatattgtgtattggtctgatattttagtatatagtagaacatactttttttttctttaagccaaatgaaaagaggtaactttgcttttttcctttttcttacctatcaaatagcatttattacatgtctttcagtgaaatacttagttgttccaggcacctaaaatcaattaggaagacatagttcccttcttttttgggtaatgaagggagcagtctaaagaattgtatgcatgtttgcatggggttattgagacattggatgtgaaatacctaggaagacatgtatggagaatgcttaacaaatgctcttctcctttttctgtcttcccttaggaagaacgttatctctcttctgattaggaaggacttcccttttgagtagatgctggaaagtggaggttttttttgttggtttgtttgtttggttttgtgtttttttttgagatggggtcttgctctgtcgcccaggctggagtgcagtggcaggatctcggctcactgcaatctaggtggaggtctttttaaataacctcatgttacttcaggcaaatctggtacaggagaagcccaagctaactgagctgggtgaaggcttgtgcatcacctggcttgagttccttgctgtcacagatgataggttcatgtacacaacattaatgtttgataaggaaagcattttttttttgttaaaattgaattgtcagtactttacttttttccccccaaataggtatatatagactgcagaagcttcagtcccatatataaacgttcatgtcattttagaggattatatggttgtctccagagaaattaacttacattatcaaaaaattctttgtctaatatattggagtctttaaaagtgttgaagaataaaatattaattagaacaacttcaaatgctaaggtgatgttttaccgggacttaattaaatacaactttttcctttcgaaaaagactgttcacatttgcttccaggtgtaattattgctttcattccttacccccctcaagcaaatgtgaaaagtatactgacctaagattctcattagttttagttcttaaaacgaatagtaaatgatttcacagcgtaaaatttgatgttatttctggaagctggatgatatggaagagttcatgtgcctggacacacagttccctgtaatcctgccatctagggagataaactctgttaacattttgatgttgtgtttttgcttatttttctatgcatagttatgcatttatattctcaaaaatgaaatcataatgtacattgctttgtagtctgctctatatattgtcaatatgttcccatattaaatattttgctttttagacagctgtaggatattttatttcatgggtataccataactttaagatttatttcctattcagcaatttgattatgtattataatgtaatctgtaaatagtgatatgattaacatcttaatcacatccatagaaaatgacttatttccagaagataccgctctaaaaatgaaattgttaggtgaaagtgtttttgagaatttttatatatattactcactgcagagatcatgttcatttacattcccattagcaatatatccaatgctcagaattgaaaattactacttaaaatctttgcaaattgaataattacagaaaagggctacatttaaaatttgtatttgtttttcttacttagtgaaggttgtgttttttttcatattcattggccatgctatattcattcttttgagaattgctcattcatattttttctgttgcttgcttggagaatttgctctttttttggcatataagttcttaagaatgtccgtcctttgtcatatattgtaactttttttagccttatttgtcatttaacatagtttgtggtatttcagtatagaagttgttttctttaggagtctacctttgtgtatgtgcttgaaagtatttttgtaatccaagaatggataaatgtccttattttcttctagtattttcttatttcacttttacacctatctttaaaaggaatttaaattttgtttatatacattaactaaatcagtacaagtttggggtgaaaaggaaatttttaatccatctcaaatgtatttggttatattatataaggtagggatttgattttatttcgaagaatttaccaattggttcagtatgtgaaaccaccatttcccctctgattagtaatgctatttttatagaatattaaattcttatgtgtcttttgtgtcttaggccaatttctgggccttctgggttttttctacactgtcaataattatcgctttaattggtgttaatatttggtagtacacaggttctcccttgttcttttaaattttgtgaaatataacttacaaataagtacttaaaacagagcttaatgggtaaagcaacagctgtgtaatcacaaactagatgcagaggaggtcttgccagcactccaaaatctctgtgtgtcccctcttgacactcactgtttcccccagagctaactatcctgacgtatggtaattctccctctgtccttttaagaattattttaccagttatgtgtataacaatatggtttacattttgctcacttttgacttatataaaaatagaataatact

SEQ ID NO: 72 - DNA, 125639 bp, Homo sapiens
  allele (1)..(125639): GRINL1A Variant Allele (rs4774282)
gctgaggctgcaagtagccggcgccgtcccgcgtcgcccccgcgcagggcgggccccgcacgcttattctgcccgggaggaacgccggcgtccagcccgctaccgaccgccgctgcgggatgctgcgctccacgtccacggtcaccctgctctcgggcggcgccgccaggacgcccggggcgcccagcaggagggtgagtagcgggggcgggagccgccgccgtcccgttcccccatcccggccgccccctctagaggggactagggatgggaaagctcgggagccagcacctggccccgacgccccaccctgggctcaactccccggtcctgtgccggctctggcagtgaccctcccgcttgaggtttcagggggcccaccagctggtaggagagggcttaggggactttatggaattcccagagatttcctctccttcctgcctttctgtcaagccgagtttattggcggcaccagtttaaaaatgaaggaagacatttgtgcagtgtccctaccttgagactcaaaagtaatgaatgtatttaaaactcaaactttccttcttccattaattaaaagaaagatggggtcacttgtgtccactagtgatagggtatccactagtgatagggtaattctggagtggggttagccaaggtgggcaaaccagaacagcagccggccgcccaggagcccgactgtgtgggactccggtttatgtaaaccactttcttctgtctgatttaaatattagcacagtgacaacaatggcagcactgaaagcttgggacagcatctccagggaaggtttccctttggaagtgctgtttctttttgatctttgtggcatcttttcccatctctccagatgctctgtaaaagaaatgctccatctttctaacacggtcagcaccttagagccacagccaggggcttggcttgtggctttttagttcttccatttatcatgatgttcaatacttatcatttggtacctctttgctctgattgagacttctgtaatcgtgtttcctcaagatttaaacaggtggttaagtccaaagcaaaacccccactggttctgtctgcgtgcaggcttggacctgcttatttgcttttacatgccttaagcgagtgatggtggtcaccttataagctgtctttcttagctctagaagaaaggtgtgttactcttgggcatgggccaactgatggattctggggtgtgtgtgtgcgtgcactcaccagacacttaggttgtgtacacaggcgcacacacacacacacacacacacacaccccagaatccatcagttggctcatgcccaaggttgacagaactccagttgtccaatcattagcatcatagagtaagatctacattgggtccaagggggtttccaaccacagtcctggccttactctaagttgggtgtttgtatttttctatggaaatctttctcaatttgaacacaattgcaactgagaaagaatgaagtcactgaaaagctaaccctgagccctgagaggatcatatgtgtgaccagactgcatgaattgcatgaaattctctgtaacttcccttccagaggtggggattagttggggtacctaacctaatacggtgggttgatacaaatgtgactagtatacaaataacatttctgaagattttgggtcaaacgtttcctttggaatatttatttaattataggtgctttgctgtcggacacattgtgacactcttgaaaagactttgccttttgaataagatggcagacgtattttggactggagaactcagggctcgggatcaggccattcagggctgtcctgggtacactggtacttgtttctggaaggaaggtatctaaagggtctagggttctgcccatctttatggtttctagctctgctcatgatttgcagatgttacaagtactatctgtgtgtgtgctggggattgtgtgtgtggtgggaagctgtgagatgttgattaattgatttattgaacattcataaacctttctctgtgtggtaaagggctggcattggggtccgccctacctgtagaggcagacattttcccaaactaacatcaaacaaagtggtgatggttatagtggggtgaagagtttacaaagttctgtagaagctaaaataaaggttcttcctgaggcatcaggggaaggcctctcactaaaggtatgtttttttgagatggagtctcactttgtcatccaggctggagtgccatggcacgatctcggctcactgcagcctccacctcccaggttcaagcagtcctcctgcctcagccttccgagtagctgggactacaggcgcacaccaccatgcttggctaatttttgtatttttagtggagacagggttttgtcatcttggccagcctggtcttgaactcctgacctcaagtgatacaactgcctcggcctcccaaagtgctgggattataggcatgagccacccagccccgcctactggtgatgtttgagtttaatcttgcaggatgagtagaatttgtaggggaattgacattattgggatactgaaaggaggaaataaccatctcaatggaatacttggcatatataatcatgtactgcataaccacattttggtcaacagtagccaggatatatgacggtggttggaatggtaggctatctcatatcgcctaggtgtgtggtaggctataccatctaggtttgtgtaagtgcactctatgatgattacgcaacgacaaaaatcatcaaatgatgcatttctcagagtgcatctccacggttaagtgacacatgactactttatcatgatggcaaattggacctgctttgggacaaaatacctattgtttagaaaagcaggaacgggatgtcctgaaagtaaaattgtagaccaaataatcattggaagtgtacctttcattgaaagttgttcagcaaatactgtattgttctgttattcctctctgatgatggacaagtgatggtcttgaacatgttatccattaaaattgtatttctggttcatccaaagagctcatcaaattgggtactgcaggggaaaccagcctatgtgggtccagatattcaagccaaccagaagtggtggtgacagctgacactgagcagggactcctgcgagccagctgccaagggttatgtggctggctggactgccaccagttagcctttgttcaatggctgccacctgcaatttgtatttccttcttatctgaaatcacctctcaaggaaaaaaaaaccaacaggtggagagagtaatttctgtcagctgataaacaaagctctgaaaggcatttatggatgccaaccagcagaagttgtgaaattaaaaaaacttccttcaaaccagttgtgcactaaaaatagttttatctatggcaacagcaggaagacaaattgactggagaataaccacagccagaagatgaccttggggaatggggggaaacgattttaaaaatattgaccttgcttcatgcttttgaaaggaattttataaatgccagttagtcttgctaaatgggcctttgaaatggaaggttggttgtgtggctgggtcgtgtgctttgcggggaaggcatgtgttgctttatggcttccccacaaagcacacaaccgggtcacacaactgacctttcggcacaatacttactgccgagtatttttggctaagctgttctgatcctgggctgtggaatgatagatctgtcaaggatcttctccagcaccttgctctcttgataataaaagactgttggctggtgttgctgctatcgtgacccgtcactggcacagagaaaaaacaaaacccaacaaggtcacaggataggactatctcctagcctgcccttgctgatatttctttctatttggcaaaggcttcctctgttaaacactggaatgggcctgctagtcattgttccttggctaatgtgtccctctcccatgtcccattgctgcctgactgggctaagttgtgagggtttggaaccaaggcgtcctctgggctaagggcagggcttaaacctgtgccggtcaaaaatgatggttgtaggctcagaaaaagaggtgcccagctctatgcttttgatctttcacattgccttgtttgatagaggatgaacagacctgaattctggagactcgtaaggaaacttgatttcccctagacatttatggagatcccatggcttttctacaaaggatatggaatgtgattttgacccatttgtctctgggggcactgatggagtgctgcgtatgaggtccctgttgtagtttacctatgctgtgcatccatatctgaacaagagacctggaggctggtgtcactaagccctggtcactggggaaggctttgaagtcaattagcctcaaatgttcttgtctaattgagttcaaggagctgtgggcccagggctgactaactagagaccatgttaaatatttcaacccaagatacttctcagcactcatcatgccttatggtcttacggaattccagtacttctccagcacacagaagagcaatacagtggtgtttacctctttccctctttggtgagtgatagttcctaagtgtcaaccacactcctggctctttttcactcttaaaggccggggtgatctttctaaaatgctaaatctagtctcctgactcgtctgcttcaagagcctcctcagtactgccaggaaaaagttcacactccttagtgtagcatccaggccctctggtttggcccgtgcctgtgctgtttcccctccctatatgtggtcttctcagatattccaaatcgtttgccatttccccgagctttcgatgccgttccttgcctctttgcttttcttcatgtttctcctctgatgagtgttgtctcctctaggaagcctgccctgaaacctcaaccctccttctcgtgttcccctagaggcctgtgcatgccaccattacttgcgtcacctgtgattacctactggaagacagggcttaggaaccacccctccccaggcctggtggaataggcagttaaaaacagaaatctcaccaggtcctacgtagaggagccacagttaacattgaattggcaaatggaaaaacaggaagagaagccttgggttaaatccatcccatcacttctgacccacctgggcaggaaacgggtgacaaatacatgggaatgctggcccaggtgaggaggttgacagttctgggaagtcctccaaatattcgagttgcctcatcctgctgcacagttggagcttcatccctttggttcagtcagtggttctcaaccagttatacacagaatcactgggaggcttaaaatagccatgtcgaggcctcatcccaaaccaattaaatgggaacatcttaaagtacagaaaagcatgagtattttttaggaagcttcccaggcgattctaatgtgcagcaaggctaacaatatttctttaagcattactcccttctatagctttcttggaaatgcagacactcctgggacagtgttgcagaaaggtcccttgagccttgtgggatgaagggcagggtggtgatggggcagggagggggagtcctcgcactccaagtcacactggcatctttgtgtgccttcatccacctgtgttttctctctggatcttggcgtttggggcacattgtgtgcctagtacagaacacagccacagaaagcaggaatgttttgtatgcctctgagctaagaatggttttcacaggggcctgcaaaacctaaatatttactgtctggctctctacagaaaaagttcgccccaccctgatgtagataattgggctgcaagttcagggccacagcagagccaagaggtctaatctagatggggcatacactgttccgcatgcagcctgctgcaggctcctgggatttgatccttgtgctgagcagagagtgtggggtctgttccccctagccacacttacaagggccccaccttttatcattaaggggagctgggcagggacccacagtcacaaagtggaacaggcctgagagaaatgtaaatgcacttggctaatttccttagggaaatccatctttgtaaactggcaaacccctgtcacctccctgaatcatcttctccactccctttttatttgagatagatatttttcccctgggtgagccaaggtgcctgaagttgagagcatgatgttactggatccgcagagtaccccgtaggtgagacccaggccctcatctccacaaaagggtcagaaacaaggcctgaggggacccatgtagctccccaggggccctgagttgccaaaaagggttttgttgtgctttttcttgtggaggaaacctgaatgctacctgtccctcccttgctatccttcccaggggggttggtttcaagaaagtgcaaggcactccagggagtttcaggtatattcttactttgttttagttcaacctagaaaaaactacaaaacccaacactgagcgagcgcccatcatgtgttgatactatgctaagcaccgtaggggctatattaagtggtgacggtacaaagcttacttgatcactccccctatgttttcccttccgtccattgtgtggtgcatggaacactggaggcactgaaaaatgaccagttggattattgaaatgaactcagatttgaatgttagtctcttcctccaaagatttgaatgactcctcattgtcttctgactagagccagtgcttctctatcatgcatttgtagattgatagttcagcccctatctgtttgtccatttgcctgtcctacccaggcttaggctgcaggttcttattcttggaacttgccgacatctgtgtgtttggcacagactagaacgccttgcctgatagctgtctgctgttgttatgatggtgggttctccaaacctcactgacctgtaaagtcctttctgtccttctatacccagcttaaattgtatcccgagggtccttcctgagggactttcccatatattcccacctcccattaagattagtgttcttcttcctatattcccatgataataaagaatgtttacagagtgcttaatgcgtgccagaaattgtcctaagctctttacacacattagctaatttaatcctcacaacattcctaagagggtatagtattgttagttctttttacaactagggtaatggaagcactgaagactaagtggctttccaaaggtctcaaagctagtaggtgtcagaaccaatactggaagccaggaagtacatttccactatgatttaaccacaaagctatcctgtctctctacaccttgtattggttattccaagtgttcttgattgccttgtttgggtatatttctagattatgtactccttggaggccagcatttttttttttttttgccatcgtcgtaccctcatagtccctaaaaatatttcacaagtaataggtgctcagtaactgagtaataaagtatgctgagtccagcttcctgctttgatctcctggaaggaacccttgcccccagggacagctggttcggtagcagtggtgttcagggtaggatgcagttcttcgcattgtgcataacacaagccctgaaccagctgctttgggaacccctgggaataaagtgccctacctgcctttcaggcactgccaagcctggggcatctctggagattgtgtatccgagtttcaggagaccatggagatcagcctcgtaaaatgctcggaggtaaggaatgctgccttgatgttactcggggagattttcccatggggagattgcggaaggtgaatgaatggagggaggtagactgtactcggacaactttatgggtggttcaggggttactgtccttagtgcttctgttagggattcagagtaccttttagacctttagaatgtcccccttgctgctcctgaagcagtcctgtggaaggattagtctctttctggatctgtctcttcccgacatattttctcccagtctttgttattactataactactattattattttaatcaaaaccttacatatcttaacatcgttgccaccaacacagaaatctgtttccttaagaatatcttccgcctacatctacacaagttatcagggtatatttaaaaaattaaaatgggattattcttaatgttttgttctgcaactttctttcttccccatggccatacatttggctatcttgtaaggaagatgtgtgattctgttctaagctgggtttaaattgctcctgaacagccagtccatcagtgggtcagtgtttattaaagaaaaactagctttgctccttaatgttttgatcaaagcacctctgttgacaagagtaaacttcagacagggtgctgcagtagcctcaagcgcctgctgcaactgccaaatgtctttgaggtcatatgttttattttacaagttcattttattttatgcattctgtttaccttgtggctttgtatacctcagggtattgctcagtgtgagagcttcatataagggttgcccagctcatcataggaagtgtgttgaggaatatagatgggcagatgaagaatgggctcaagccaggggagggaccatctaacttttgagtgattggacccatgggaccccctttctgaaaattatgaccattaaggattacccctctaaaataatcaaccaaccgaaagtcatcacttacagtgttaatgtctctgattcattgaccaaattgttattttcatggaaacaggactgtgaggctaagcaggtctgtttcattttgaagcatataggatgatgataatatctagataatagtaaaaatatctggctgggtgcagtggctcatgcctgaaatcccaacacatttggaggctgagacaggattgcttgagcccaggtgtctaagacccatgtgggcaacatagtaagactctgtgtctacaaaaaataaaaaattagccaggcatggtgatgcatgcctgtggtcccagctatttaggggcctgaggtcggagaatcacttgagcccaggagattgaggctgcagtgctatgattacaccactgcactccagcctgggcgacagagcaagacccagtctcaaaataaataaataatcaaataaaaataaaaatatctaatattcatagaggcttactatgtgacactctccctttatcccattttacccttgagattcagagagattaagtaactttcccgtagacacacagctagtagatgttggagcctgtgtatgtgtgtatgtgtgataggcatatatgtacgtgtgtgcacacttgtgtgtgtgtgtgtgtgtgtgtgtgatgtggtgcaggagaaaaggacttccttttccctgcagaattatgcatggactagacccagcctaataggagattgttgagcaccacaggtttggattgtctctgtggtctgagttacactttgatgcttgtgcaaatgtcagactggtttcaaccagtctgaggggcctggagccagagagttgcctttctctggagggactcaagattccctactcaagatcagtgttgttgcccaccaggaaagagagctacctggtagtatggcttggtttctttttggccaacatgactgacggtgagctttgaaggttgcttgtaaagttggccccacaagaggcaatgatagccctgggggtcaggccacatctgattccggggtccctgggggatgatgcttgccaagaggaggatgaggatggagagggatcttgaaaccaagtcatgtgatttaaagaactggggttgtttcgtccagaagaaaggaagttcaagggacaggaggactgcctagaaaaaggggaattagtttgcagtccgaggacaaccctgggtccattaggtagaaattctggtgtaagctcagatcagcaagttagaggtgcctggtagcaaaatgcaatgccttggagggtggcaatggtgtacgtggaagtgctaacatgggtcccaaacctgggctccctaacctgttcatggaaaatgaacaggttggtgccacctgtcaggtacatttttgggtgttgggtttcttcaaaggtgggcaggttgaactcaagagatttttgacattccctctagccctgggcttctaggctgcagggtggttttgctaagaggccaccctgtggaccagtgcagatctgtgaacctgccaaccagactgggacgggggtggagaggatttgtttgctagggctgccatgaaaactaccacaacgccattggcttaaacaacagaaatttcttgtctcacagttctggaggttagtggcccaaaattaaggtgttggcaaggttggtttcttctgaggtctgtgaaggaactctctgttccaggcccttctccttggctgttgatgggtcgtcttaatgtttatatgatgatcgccctgtatgtgtgtctctccccaaatttcccactcttataaggacaccagtcattttgatttagggccacacttatgatctcatttttacttgattacctctgtaaagaccctttcttcaaataaggtcacattctgagatgccaggaaggcggtcaggacttcaatggatgaattttagagggatgcaattcaacccatattagggagccaacagcactcccgcgaactgagcccacatggcatttcaggcatgtgatggggaccatgagtataagagctaagaaagtaagccccggagactgcctgggttcaaatctcagctctgtcatttcccagccatgtaacccttcagaggcttagcttcctcatctgaaaaatggggcaggtaagagaatctcttaccataggtttgtggtgaggcttaaatgaataaatacctgtaaaacacttagaagatgcctatacatggttagctattactattattactgttattgtcccctcgtactacagattatagtagtccatttttccctctgttgagtaggaaaatgactttgcccctaagtcacccttcgtcaacagaatatgataaatcacacaaattgtagcttctctcactgagtggtataatgcttttttatttttaacagaaatggtgcaatttagactttaaaaaatcatttaggaacctttatccgatatttcagtgaaattttttggcagcctttaataaactgacgtgagaatctcagtgactagtgacaaatattcatggtgacatagctaattaaggagtcagatgtcttaccaaaactcataagcattatattttcttctcctaagcctttccagctaactgtcttacttttagtctgtatccaacaagcagggacagcttttttttttaaattgtagcaatgtacttgtgagatttaccattttgaccctttttaagtgtatagttcagtggcattaagtgcatccacactgttgtgcaactggcaccaccatctatctcgaggatttttttcatcttcccaagctgggattccatgcccattaaatactaactttccctgtatccttaccccctggtcaccacagttccactttctgtctctatgattttgattactcctggtacctcatctaagtagaatcatacagtatttgtctttttgccactggcttatttcacttagcatagtgtcttcaaggtttatccatgttgtagcatgtgtcagaatttccttcctttttaatattgggtaatattccattgtatgtataaataatattttgtttatccattcatctgtcaatggacatttgggttgcttccaccttttggctattgtggataatgctgctatgaacatgggtatatggacttttttgaaaaaaagttgtgattaaacatgtacatgtatattgtagaaaaattaaatatataggcaagtagaaagcaccctcccttcccaatagagatatccactgtgtatattttggcttctttccctgtaactatatttttgcctatacttgtgaaatgagatcattctatacatattcttatggaaactgagccattggtaaagaaatgtttgaaatagatcaagtgatttggtagtttccttccttgagccccagggtggtgggtgcctgtgctgtaccaggctggcctggtactgtgaaggtaaggctggccttatctcctctatggctcctgtatgatcaggacagtgttccccaatggaagtaggggaaatgggctgtgagaagcccaaggtcatctggctctttctgccccaaatgctgactcctaactggcctctcctttccctctcttctaggcaaatgtttgcagactacggctgaccgtacctcctgagagtccagttcctgagcaatgtgaaaagaagattgagagaaaagagcaggtaaggtatctccgaggcaaagccccaacaagttccagcctctatacccttaacccactctcccatctcctaaccaggccattcccagaggctgggtgtctgcacctctgttgaggagaaggccctctcaaccttcccacctcatctcccgtcttcccagaagacagagagctctccctagccggctctgccaccgacgtgccctgctcttgtttcttggtgaacactatggctttgtgttaccttgaagctgcagggacactggtcttagtgacaggtgctgtggcggggaacgtgggttttcctgaaacagcccaatccagttgcttcaaagggcctattgtgagcagctggcggggctggaacctttctcagcagcttggagcagcagccgggggctctgctcccgcagaagagaggaaaggctggcaggcaggctggtgcagggaaagggcactttcttggctgggggtaggaggcattcggcaaacatttttgtgacagctcctgtgctaagtgctgaggccgtgaagataagtatgtccttgccttgggggaatttgcagttttctgggtgagacgatgatgtgatatttcaggtgttaagatccagccctatatgacggaatctgggaacacagagaagggaataactgactgcttgggaggtgacagtgaagttggaggcttgaaggataaagaggaggtcctgctgacctctaggcctgtggtcctggccgacccattttactcattcataattatggggcacctactgtattccaggcactgttgtatacagtgggaatatagtagggaacaaagcagtaaaccaaatctgtcatccatggaacttatattctagtgggacaagaatggaagtaaacaaaataattaagtacattttatagaggttaggaggtggtaagtgctgatggagacaaagtaaaagaaggggtaggggtgccaggaagtaggcagtactttttcttgagcatgtattttatatgattataaagtaaaacaaaataaaatgatataaatttcataaatggagtcataacatagtgacctcttgaaatacaagcttgctttagagttaaccactaatgtggtcaactataaaaaagaaagcttctcatcgatggctaagtgtttgataatgtccctaagtttaccataggtctctgtctctccttgccctctcctccccactttctaccaaggacagagagctgcctgtgctgatgcaaatgatgaatgccagggaaaggaagtagggagaaaagcaaatgaagttctgactagagaaaggtgaggagtaaaattgctgatctgcctaaaaagagtggatgagttccactaaaaagatccagaaaaacagctagttctgggttgcagaagggaaaagatgagggggatatgggacctctggaaaataaggtttcactcagagatgaatggggtcctagtaaaggacctagcagccagtttgaatgggctttcactggccaaaatgggaacagctggagcatcaaaaagaataatgacagtcatggcttataacacatcgaatattaaaaaaaatccatacgtttgtagtgataattggagaaggggagtagaggcacgagatcagaggataaaatagggaaggctcccttttttttatagaacactagctaataagtttagaaaatctttgttttgtaacctccaggtatactcatcaatagatgcaaaaataagttggtgaaagattattgtaggatattctcaaagtatcaccccagcggattactgattctaaagggacagtaccttcacagtggagtaggcaggcagccagcatttcaaccaagtgatccaacctaacttcaccaatagtggaacgagctgatgttacatgacttctgaggtgattcacctaagaggtgcacatcacatatgtaatattcatgccaaacttgtttaactgaatctaataataaggaaacagaaaaccaaaatgtgggacattctgcaaaacaattggcctgaatccttcaataaattcaatgttatttttaaaaaagatgagaatttgttgcagataagagactaaagagacataacattaaatgtaatgagtgaacctggattagatggtggcaaaaaaaattatataaaagatagagcacatggacgcaggaaggggaacgtcacactctgggggactattgtgggatggggggaggggggagggatagcattaggagatatacctaatgctaaatgacgaattaatgggtgcagcgcaccagcatggcacatgtatacatatgtaactaacctgcacattgtgcacatgtaccctaaaacttaaagtataataataataaaataaaataaaagatatactgggatgactatacaattttgtatatgaactatatattacatattattgaataaatgttaattttcttgtgatgatggtactatggttatgtagttgagtggctctttcagcttctgtgtagctttgaacattctccacagacaaagtttgggagtaaaagtcctaagcagagagtggaagtggtcaggcttcagctgctacacccctgctgatgagcaggattgagtggggccatctgtcactagggagtgtccccttctgtcctcactgctcctctccctgcctgtcccttttagagctaatggcttggtccaagacatgggtctgggctgtgtccaggtgctcagagctgcttagaacactttttgaagaagtggcctaagctggagtgagggacaggacaagggcctggtggcagtacctgttggtacagacggtagaggaattggggaatatagtcttttggagttagacccaagcttcatgccttgggagatgttcgtgaaaggtttctgagtgccaaaactggggtggtaggggctggaggaccctggagggtctgtaaccactgaagaagaatcaagtaatcccaaggaaggagcctcgtgtgtttagctgtgtcaactggagtcaacaaattgtgtgtcagtttgcctatttggcttgaatagtgcttttcaaacttgtcaataggaccctcttttttaaaaaaaaatcagaatgttttactgagccctcatatgcaaaccaagcaaaagtggtactaacgggggcccaagtcctcccagtctccctttacccctcagcccccagacaccctcctgtggttgcttgagaactccaaggccctgaggagcacaggacaggcactgctgggatagcatatgcaccaggatacttcttacaccaggtggaccaggcgtgcagtctaagtgcctatgtgtggcacattggtgactcactgcagaagaactggggtagaggggaggagggtggggctgttgtttccctagggatgaagtccttgggtggtggcagcccttgaagtttctaggggtaactgggaggctgctctgagtgatttcgtcaccatgtcctggccaggttcctggcatgagtcactgagggccagggccatgcactgtcggggagactctgtaggggccacttccttggatgtggtttcaacatggcttcccctccttggaacccatggaattgcaagaggccaaaactctggatgaccctccctggtcacgtaactttggttcctttgaaggggcttcttctgtgtgcaaaggccaggggattggagctggctcagatatgtgagtagaaagttgtaaatggcccgattgacttctgttgcagtgagacttctcaaggatttccagggccctgttagagccgcacatgatgagggcagcctgggccttccttagtctttcacactgttctgggaggtgtttaatattgcggggatgccacgatgccatgggacagctggccatgcatagaggctgctgccagttgggccattcttccgtttgctgttctccagttattggagaaaggaattgctcccaatgtgggtgtgttgtggatggcgtattttgcccatttccacaaaggtgtgtttggaggctgctggatgcaattacaacagagtcagcaccttcttatggagtcaagggtttgtggggtgtatttggaggtttcctatccctaaggcagatgccctggctgcctgttccttttagtccttcaggagacatcaactgccccgacactgctttatgctgaccacagatgagctcccaaatgcacagcttcctcatctttaaagtagacacaacaatgcctggtttcaaattgtaaataagctaatatatgcaaaatgcccaccacagtgtccggtttataatatggattaaagaggtaatgactaaacactgaatctcttccctttgaatgccaaagccagtggccctgggtctttgtttttacccccttagaccttctggagttattctcctgcctgaagctgcctgtctttattttccaaacacatagcatctcttccttcctcataacccttgctgaggccctagccatgcttggagtcccttcactgccatgtctcagtttatctaagtcttccctgtccttgaaggctcagctaaaggcccacttcctttctgataacttcccagacttctatgtgctggggtggtcactcttcccttaacctacaggacacccaggctgcccctttcacttggcacctagccacgtgctgctaagaactccacataggtatagatatatatttttgcaaaatttgtatataacatgtatgtaggcacatacacacacacagagaaatgaggttgagtctttttattctctcttcccaaagcctaggtggctgccttgcacatagtaggtgcttaatgaatgcttattgattatgatgattgagttttatattagcttcctagggctgccacagcaaagcatgaaaaacgagatggcttcaataaccgaaagtattctgtcacggttctggagttcatatgtctgggatcaaggtgctggtggtgcctcctctgaaggctccagggggagaatttttctttgccgcttccagctgctggtagctcttggtaatccttgccttgtggcagcatcgctctgattttcacatggcattttcatgtgtctgtgtccagattttcccctttttatagggacaccaatagggcccagtctgatggctttctcttaacttgacctgctctccatataattcctaggtactggaggttaggactccagcatatctttttgggggacactcttcaacccataacaggttctttgaggaaatcaccttgaattatagtaacaactcagatgaattagctgtgggcttttatttgaatattgaacattaaaaatcattaataatatgggagggaggatgctgattagtttgtgggcacaaattacatgttgagaaattgataaatgtagaatataatgtttataaacaggctgaacattcaaattaaaattggtaatagttttgaaattaagtacctgttgttttcaaagaactctctgaatttatgtatccatattcttatccatagtcatgtgcaacagattcctatgtgtatatgcagggacacacacacacagacagaacccacaccagctattgcagacttagcatattgaatcagggcctcactgcacagttgaattttagggcatctgatctgagttgattctgcgtctttatgatggtaaagtcctttgcaaatagataaaatagcttgaggcagataccgttttaaatagctattaacatcccagctttggaggtgtccttcagtgacctgttgtttttaaagaagctgttttctctctagatctttgagaatgctgagtgagagagagagcagatgcgtgggtatggatgtagagttgggaactttcataacccaataaaatgttgaaaaggaggaagtccttgccagtaggttttatagtcctctttcctttaaaagccttggatgaataagcctgctgagttctcgtccttggcgtgactgtttatacaacctcgcgggctgttgccaagtgagcgagtgtgctgccatgattcagagcttcaggtgggggccgggctgccctttgtgacagcacaccagggactctgcgtgcccctcagagataacagcccctggaggatggggagagacctagagtttgagtcccggcttcctcatgaacccctgtggtggttgggccagtcaggtcatctctaggggtctttgctgcttcttctagcaaatagaaatgttagtctagagccagtgtttttccaaacattcctttattcacgttgataaatgtggaagttctattggtaaagcagtcaaggtgcagcgggtggagctgaaataagatcagggctatgttggctgcctccatcaggcccccaactcttcaccctacaaccttgtcagacacggaggaggagctgggaatagtgtctgaaaacccactggactatacaactcttttccatttttctaaccttctgagactttgtgattcactacccatgaagagaaaccaaggccactttgggggtgaatatttcgctgtcagagccactttgacaactgtaatgagaacagcaaaaagaccaagaagaaggtggacggacagacagactcattcagatagacatgtagagttgagtaggaacccatatactcaaaaatgtaaagaaaccacaccaccaatactagaaactcccagtatctactagtatgctattagcacactaggtgttttgtgtgttttattctgtgtattctttagactgcccactgaaattggtggtatgatccccattttagtgttaaggaccctgaagctctttaaagtacagaaaataactttcttaggggcacacagctagtagatagtggatttgcaattccaactcaggtctgtgacgggccatgttgccatgggaacattgacttgcgtgccttctcctatcagagaaactctgtttaggatatttacattttatcagtcaaggttaccgaaggtgtgtactatacccctgggttccagaaaagcagttcctgatttttttttctcccgtgtattcttcccttttccgcgggggttattaggcctaagcaactattgtctgcgttgaagctgtgtactagctgcacactagtctgcatggaagctgtgcactagcggtacgctagcactcctatcaggctgctatcattacaaatgccactctctttgggacttctgcttggctagaagctttccttttccttctcatcttaagctttgaaaatgatcttttctcctgagtttacttaggaaatgggcactattcagtctgtgagactgtcagaaataactaaattagttttattttttagaaacagggtctcactatgtcatccaggctggaaagcagtggctattcccaggtgcaatcatagcacacgattgccttgaacacctgggctcaagtattcctcctgtctcagcctctcaagtagctgggactacaggcatacaccactgcgcctggccaagtattttgataagccagaggtttcagtttttctgagaatatttatttcccaggctgtggaaaggccctttgggctcagaggtaatgttcatttttgtccaagaaagcaaaacagtgttaagtatgagtaatgacctgggccaaataatttgctgagatagatacacaggttgtacaagccagagcacattcccgaagtgccagcctctgcctgcaagatgggcagggaacccagtggctctgtgctcagcagtcccaggttagctgctgccctctggctggagaaaagaggtctgaagtaagaagttttggaaataacttggcttccagtctggaagtcacacgagtcacattatggcccttctcaaccatattggcagccaggatgtgtgaccagctgcccctcctggctggtggggcgggggactggctgtgttagtctgctattgtcagtttgatgcatgttgagctgcatttctgctcttatttcccctaagaatgctgattgaccaagggattttctttttttgcacagattaatcctcagtgtcaaggatgactgtatactccaaatattccatctttctttttcccttcaaaatgtatttatggagcatctatttatgctgggtaccagagatagagcagtgaataaggcagatgttgtccctggctttttggagcttgttgcattgtaggatcctatcttctcatttaagatttggacaatatcattggccttgttaacgcagactcttcaatggccagtaaatcccttaggagaggaatttaggctgagttagttttctgtagctgctctttctttctaaggcactggctgccagatgtatctttagggaggtcagccatagtatggggcctgtaggtagaatttatgctgtgagtactcacaggaaacagcttaatccagagattctgcgtatgtgttgggagtatggaatgccctttcagttaattttccttctttcctactttctttttattctacactttaattaagccttttattttctttttttttccgagacggagtctcgctctgtcgcccaggctggagtgcaatggtgcgatctcggctcactgcaagctccacctcccgggttcacaccattctcctgcctcagcctcccaagtagctgggactacaggcgcctgccaccacgcctggctaatttttttgtatttttattagagatggggtttcaccgtgttagccaggatggtctccatctcctgaccttgtgatccacctgcctcggcctcccaaagtgctgggattacaggcatgagccaccattcctggccaggccttttattttcaagcaaattctgtctagtattgtttcatgcccaggaggcttttaatagagtacattttttaaaatttgtttttttagtaccaagtagcattataaagaggcttttgatttttaatttaaatttaatttaatttaattttcttgagatagggtctttctctgtcgcccaggctggagtatagtagtatgatcacagcttactgtagcctcaacctcctgggctcaagcaatcttcccaccttagcctcccaagaagctgggactacaggcacacaccaccacatcaagctaatttttgcattttttgcagagatggatttttaccatgttgcccaggctggtctcaaatgcttggactcaagcaatctgcctgccttggcctcccaaagtgctgggattataagcatgagacaccgtgcctggccataaggaggttttaaaaaacttaattttggagagtttcaaacatacaaaatgagactggatcatgtaatgagtcattgatcctctctccagcaccagcaacctcaatacatggccaatcctgcctcatctacatccacgctgtataaggaaataaatatacatcatctgtatctcagcatgtttctctaaaagagactgtttcttaatatcatcataatgctcttctgcctaaaaatcaatacttttcttattgggaggtattttaaaggatacaagaggagagaaatttagccacaaacatcttgctcaacatatcagcttttttctttttttccccgtgttcagtttttgaccaaaagcatactgatattttataaaaatgatagccatctatgctcctagcagcttttctgggtatacatgttgtgaccggggtaaacattaactgtctgttcctccatctaagaagaataacaggtattcacttcatttggaccatatttatgtaccctgagtaattcccagacctctcccaacttctaaagttccctattcattcagcaagtatttattgagagactcattgcacgtcagtcactgttagatctgggaattacggtggaaaagaagacaaagtaggccctggacttgctgcaatttacagttgatagggaagcagggcttccccacacaaggatactgacatacaccaacagtcgctgggctgcagctgtggtgagtgtcgtggggaagtgctgtgagagtgaaccgagaagacctcaggggtctgaagggtcaggaaaggcgttcttgattcttgaggaagtgacatttcagcccagcagtgcagatcgagggaacagcatgtgtgactaccttgaaacaagaaggaggctggctcctaaaggaacagaagggaggcagtgaggcaggtgtggggttggggatgggcaggggaagtggaaagagccccccatcctgggcctgcctcttccaaatggccctgggacctgagagcaggctcttgggttcctacggctggagaccctgggatgctacatggagacgtgagttccagttgttctcctgactgtagcattgtagtgaaaaaagaactccaatttggaaagacataggcaggcacttgcaggctgttaccctggaagaagagaagtcatactatttacacagtagggtcattgtgaggattaaagaaaatatatattttattatatattatatgtaataaaatcacctgacaacaaatttcttccccctcctctttcttcagtaactttcttcttcacttttcctgtcagggaccatcagctccttgggctgcctcaggagtcctctcccctggtgtggctggtgctgatggccctgctccccagcgggtagagtcctggggccgtgcccttcctgggggcgttttatttagaccctgacatttacacaaatgttcaattcaaacataatgcttttttctttttgccaaaaaacattcaaagtctacaaaagaacataaaggaaaaagtgaaatctcattttcctgaggaaactgtcgttagagagctggattgcatccttctagatgttttacatacacaaacacacagtcttcaaacaaaaaatgaaaatttgaaatttatgatttttcactcagtgtatcttgatctctttctgtgtgtacaactttgagacctgggccactcgggagtgttccacagacttcattgttcctggcattgcttgtgttttccctgctccgtggcggcttcatctccctgcttgggccaggggcaggatcctctgtgtccggccacctgagttttcctgcaagccagtccacctctgaaagcctttgctttgcagaaatgcatttcaccaaagccttgtgttgtcattggcttgttttttaggaactgggtggagtctgtgactgaaagatcttgcttttgtttcctggtatttggggagtttcattagagcttttcctcttcctggttatatgtccagtaaattggggataagttaatgccagctcttgactctgctgcaagccatttaacagctcagttacccaaacttaagcacaaatgtaaggatagcatcagtgcctttggggcccagctgtaagggactcagggggaagcatttaccagaaacaagtacaaggaatcacagcttcttgcatcccatctcttcccaagtgtgggaagaagggcaagaagcaatggttgtagtattttcttactttttaaaaagattacattgaaacgaagcaaaacaaaacaaaaaacaagcaatatagaaaggtataaagaacaaggcaaaagtcaccctgatctctagcgcccctaccccatccatggttccttccttagagacctgtaagtttaatcatcatcacatagttttctagacctttctttgattttgcaaactttgaatgaatgggatcataaagtacttaaagtacataaagaacttactgttctgccacaatgaatgattttcaaatgcaaattaaagttttgtgtgttaaaaaatgctttgtgggccaggcaaggtggctcatgcttgtaatcccagcactttgggaggccaaagcaggcagatcacttgaggtcaggaatttgagaccagatggtgaaaccttgtctgtactaaaaatacaaaaattggctgggcgcagtggctcacgcctgtgatcccagcactttggggggccgaggtgggcggatcacaaggtcaagagctcgagaccatcctggccaacatgatgaaaccccgtctctactgaaaatacaaaaattagttgggcgtggtggcgcgcttctagtcccagctactcaggaggctgaggtaggagaattggttgaacccaggaggcggaggttgcagtgagccaagattgcgccgctgctctccaacctggcgagagagtgagactctgtctcaaaaacaaacaaacaaaatacaaaaatgagcccatgtggtggtatacacttgtaattccagctgacttggaagactgaggcaggagaatcacttgaaccagggaggtggaggttgcagtgagccacgatcacgccactacactgcagcctgggtgacagagtgagactccatctaaaaaaaaaagtgctttttttttttttttttttttttttgtgaatacatggcaagaatctctgtgtaaaggcagttgaaaagttagcaggacagcagaattacctttatggaatttgggtttctgtgctgtgggattgtcgaggtacctgggtcagccctagggaaaactgagagaaggtcagtttgtctgaagtctcagtccttgatcttggattttttcttacttctgtcccttccatgttgtggaggcacctactctgtccccctgcatctaaacatagcctgcagtatggggaggtgcttaatgtcagacagaatcacagagccaggcttgaatgtaggtgtgtgtccataagcaagttgcctaacgtctctgaacttcagttttctcagctatgaagtggaaaggacagaaaggacaattgctgtgtcatagagtggttgtgaacattaaatgtgattaggaatatttctagcctatagtaggttttcaacaaatcttaatttccccctttcctgcttgttaagccttcattctataaaggcgtgttaaggcttggacatgttactgtttctcaagggtatttgcatttcaacaatgaccaaaactttaactgaaggaattaagaaccagccaacaggactgggaggatccttttgggctgaagtcacaccacctcttcctggcttttcagaaatatttcatgaatggtcacaacaggttatgtactaacactacccccttttcttagaacttggccccaggaccagccctaccctcagaggacagtttggctgctagatgactgccagcctcaaccttgtgcattgtatttagtgatgaggttgaagtcatatggagaagctgggataaggggaaagacagcattattaagagcatgaggtttcaaatgcttgctcttcttactaggacaacgcaagtccgtctggtatctttgtgggaattactcttaggtgagtggacaggcccttatatacattagcaaacggtgctcttcctccggggtaaaagcagcccaagcctatgccaaatcaccttggtgaacagagactagatgggatttttgctccctccatctccactgccaggcaatgagtgctgggcacaatttgcataatcatacacagtgggcccgttattacaactgtgcatgaggcctaaagagtcattattctttttttcttttcctactttcttttagcttcttgacctgagcaatggagaacctaccaggaaacttcctcagggtgttgtttatggtgtggtgcgaagatcagatcaaaatcagcagaaagaaatggtggtgtatgggtggtccaccagtcagctgaaagaagagatgaactacatcaaagatgtgagccatttaagagtttttgccccccacctgtattctttttgtagcatgcaagagaatggagttggaagcattgaagtgaatgtaataaggcattttgaaagaattcttagtgttatcattttggctggaaatgtttctgtgtatcttcatggtaatgttaaagtacagatgtaaatctgcaaggaaggaaaggttgagcttctgctggatggatgttactaggtaagtatactcaggagagcagatggcttcctccttccgtgtagggtttggaggctcttgagtggtttttctttattgcacttaccagtcccacattcatccctggcaagaggaataggaagactgtgggtgattcagatcaatcagttgggttgaaacaaatgctaggaagtcaaccacaatagactttgtccaaccaagccaatcaatgccatttccttgtatttagtagtttatttcctatcttttaagttacatgttcttttgagaaaatttgggaaatataaacatgtatgaagaagaaaataaaatcactcataatctcactattcatccagagcaattgttaacattttggagtattttcttcttctctctctctccatttcttttcattccatcctgtgttcccctagattgactgattcccctcttgaccaaaccacccagcttatatggaagaggagatggcctgctctgacactgatgggctcacattacagaccagtggcttagaaagtgcttgtaagaggcagtgtaggggcagggagtcaacctaggcctgtgagctcacagaccttgcttcgagctccagctctgtgtctggcccagcaagtcacttttgctctgtgcaggcttcagtcctcatgttgagattgtgggggttggctgggctttgatacctaaggttaaaaacacagctttgtgagccccattttattttgtgggttttcagataagatgcaaactcatgatgtcttcgcttttgtgtgagtttttaaaaggaacatttcttgttgaatttaaaaaataataaatgcttagcagaaaatatgaggaaaagccagcaaaattagcacgcatatacataatgtatatgacagccaccaaccttaaactcctagttatcccacctttcaaacataattttaaaaatttattttattgtatattttcgagacagcgtctcactctgtcatccaggctggagtgcagtggcacaatcacagctcactgtggcgacacaatcacagcttattgcagcttctacttccccaccctcaagtgatcctcctgcctcagcttcccaagcagctgggactgcaggtgcgcaccgctacacccagataattttttgtagagacccagactggtctcaaactcctggacttaagtgaacctcccacctcagtttcccaaagttctgggattacaggtgtaaatcactgtgcccggcctccagacataatttttaaccattcagaatattcaattcctgaatttcctgttaagaatagctcagacattttaattttcttgtatttttttctcaaggaaatacatagaccttcctcacttaaatgctccggaggtatggctcctcccttagtaaccttctaaacagagtccagagtcccacattgcccaagacaaaggcaggaggagatgttggctaatcctgagctgtggatgacatgtaccaaagacatgtgccaaagacctggaattaccaccctccactgtgatccgcaacttaaaactaactttcaggtccctcctgccataggtggcttcagttccatccctggcctggtcattgcagtatttgcctttgggagggacatgcagctcaagattccacccactcaccactgggagcagcacaagagccagctcagggccacacatgaaagccgttctgcctgcctagaatgaaaagttgtacctttaacctcattttcccaaaatgtttgtacttcatggcaagaaagtagactctatttttagaattcatgtggggaagtctgggggtcttgactctcccttcccccaaatctccaccaatatccagtaacccctaataaacatgctgtctattttaaaacaatgtgcttcaaaattaagccttccaatactatgtcctaaacacttacattctaaccaaactgctatctttaggcccttcctaaaacagaaattctggagtgtgctggagaaaactcccttgagacttcctgccctatttgagggttcctgagtactttccccatcctagggataccagaagaagggaggagacagggactgtttgtaaggtcttttgttgtgttttgaaagtttttaaggtcctgctagccctctgaaagtagtactgtagagaaacttgaacagcgtttgtgtaaacaagtgtttttgggatcacttgaacttttgttatatttactgccttgcgtgttattggtgattactgaggaactgactttcaaatttatgggctccccagggttcatattttacttccttccattccagatatttgattgctctttggcagtcagggccgatagagggaaaattagaggttgctttttggtttctttggtcctcttagccatgagtctgttaaaacacattctacttgtaaaaacatgtgatgggaaaagggcaaaactttgcccaactgtcatttgagggtgataggtgaatttcaacaaaccattttttcttcagagtttatttggctaattaatatttattatgatagttacatgtaattatatataattttatgtaattaatatatattagcatatatttgatatattctatattaatatatgcctatatattttattatgtatataaaatatatacataataaaattatatatatataaattatttggataattcctaactagtttctaactagttgttgggggtgaccttctcccttaatttcctgtcttgttcttaagtttatttttatgtggggtccttctttctttttcttttttttttttttttgttttttgagatggagtcttgctctgtcacccaggctggagtgcagtggcatgatctcggctcactgcaagctccgcctgccggattcacgtaattcttctgcctcagcctcccgagtagctgggactacaggtgcccaccaccacaccccccaactaatttttgtatttttagtagagacggggtttcaccatgtcagccagggtggtctcgatctcctgaccttgtgatccgcctgcctcggcctcccaaagtgctgggattacaggcttgagccaccgcacctggccggggtccttctttctttagagtttcttaaaagttttagaaatcttgtatgaaaatgttatggcttgatctctaactagtatctttgtgggctacaggtgagagccactttggaaaaggtgagaaagcgaatgtatggagactatgatgagatgagacagaagattcgacagctcacccaggaactatcagtaagtcattatctcagttgcttggagatagggaggcatggcaggctcagagtggtccctcagtggctagtgcctaaagatattagagtatctagtgttctttatcaatagaattacattttaaataaactgagaaaattttatcacagaatgaaatttattacctaaagggaaatttttatggtaagaataatcgtattcatattcaaagcattctcaccaaagtcaggagcaaaacaaggaagccagctatcactattattatttaacattgttcttcacatactggccaaacaagagaaataaacatataggtttaaacatggcataggtagatgtaaaactatcactgtttacaaactatatgattgtatacctggaaagctcaagtgaacatgaaatgatgaaagaaaaactactacaaacaagtaaagaatttgttatttgtagcagggtataaaattttatacacacacacacagaggatataaaattaatatataatatacaaagaggtttcaatatacaaaaaattcccaaaatatcatcaacagaaaaatactacatacctaggagtcaactataataagtggaaagaaacaccatgtgcttagaaaggaagattcagcatcataagatccacattactgtaccattttaatatgacccaataaaaagaccaacaggttttgttttttataagtggagtaggtgattctaaggtttatatagaaaataaataaaaagattgggaaaataatgggaaaaaagagcaacgagagggagtagccttattaaatgttaaaagaaagtgaaaaagcctcagagattgaaacagtatcatagtggcacataaatagacaaacatcaataaaaagtactccagaaatgtacccctgtatatgataaatgtagcatctcaaaaaaggaaggaaaatggactagtcaatatgtgctattgggaaaacttatgtgctgttggaagtcttatacctggctaaattcctaaagtatcaaagatttaaatgtgaaaaataaaacccaaaagtgccagaagaaaaatatgtgtgaattcatttatacccttgaggtaagggaatgccttttcttattatgatataaaatcccaaaaccatgaaaagaaaggctgataactttgacaactttgaaatgagaaactcctgctggtaaaaatgtcaaagtcaaatgaccgggaaaaattatttgtccttcgtatcacacataataggctcattttctgaatattgaaagatcccccacgaatcaagaagaaaaaagctacaactcataaaaataggtgaaagatttgtaacaggtaatgtatactaaaggaaagatggagagagctcttttgtgtatgacaggatgctctgcctcacctcatcgtaagataaatgcgggttaaaaccatcccatgatataatttttatctattagacccgccaaagtgcaagagtgggtcaggacattgttcacaggcctgtgggcaaagaagagggttgctgatgaaaatgcaatttgctattactcttacagagaacaattcagcattatcgatcaaaattacagatgtttagatcctttgacccagcaattctattcctagcatttattctacaggtagactctcacatatgaggaaagacataaggatagatttatttattgtagcattgtttgtaatagtaaaacaattggaaacctaaatgtctatcaagtagaggaaagtggacaggcacggtggctcacgcttatgatcacagcattttgggaggccgaggcaggtggatcatttgaggtcaggagttcgagaccagcctggccaatgtggtgaaaccctgtctctactaaaaatacaaaaattagccgggcatggtggtgcaggcctgtaatcctagctactccgttggctgaggcaggagaatcacttgagcctgggaggtggaggttgcagtgagccaagactgtgccactgcactccagtctgggtgacagagtgagaccctgtttcaaaaaaaaaaaataagggaaagtaagataaacgatgtatctctacaatagaatatatgcagttgtaaattaaaaaaaaaaaaaagaaaaagcaagtaatcccttgaaggggagatacagaaagatgtagacggtgaaaaaaagcaagatgcaagaaaatatgtaggaaaaaattgctaccatttgtatagaacaggaagagaagataaacatatcaggattgttctgtgtgtgcacaaaaagttactaaaaggttaatccagaaagtaactaacaactgtttctaattgggaggcagggtggtaactgagcagggtggtaattttttataaaaatataaaagtaactttatacttttgaaatgtttgcaccatgtgagtgtattacctactgaaaaatttaagaaaaataaccttcttctagtttagccaagctaatgcttgtagacatttaaaaaaatttattattaatattcccaaagataaaagtccctgtctatgtgacgtaccttccataagagttaatatctgtgggaaagaagggcagttacaacagtcatgcatcagagttcaatttatggctgggctgtgagattaagtgcttaagtaacacctagtaccttgattataggagtggggctacgtaaatatatctccctaccccatttcttgattataggagtggggctatgtaaatttatctacctagccccttccttgattataggaatggggctgtataaacatatctacccagcccattcccactggcatgtgggaggacatttgtgaaattctcacctgcttatggaaagtcattctgccatgactgtcagacaccaatgactgtcatcaaagccaaagaattggatttgcaatagatgcataaacaagactctgctcctcgctttccatcaccatctcctacacaccctcattttctcatgctagaattgtcccagaaaccctgtctctctgcctactggtctcctccttctccaagtcatcctacctactgcagccagattaagattgctaaattattgctattgaaacacactgctgaacacaaagctgccacatgctcctgggcctggcttgctgcttcaattctgtctccactccccagagtgcacctcctgctctgctgtgccggggctgctttctgctgctcccagaggccacatggggggccttccaccctcagtcctaactgtatctagcctcttaccaatatctaggtcaagaatggcttctgactcagacatgttaaacacacacacccaacaaagacagcagcaacaacagcagcaacaaaacaactctttttttttttttttaaatgagacggagtttcgctgttgtcacccaggctggagtgcaatggcgccatctcagctcactgcaaccttggctcactgcaacctcagcctccggggttcaagcgattcgcctgcctcagccttccacgaagctgggattacaagcgtgcgtcaccatgcctggctaatttttgtatttttagtagagatggagtttcaccacgttggccaggctggtctcgaactcttgacctcaggtgatccgaccgcctcggcctcccacagtgctgggattacaaaaacactcttgagaattgagtgagaccaaagcatattctctccatggtgactacaaagaacaaggtggctgcagaagttatttcaactgggttctagttctaggagcgccacttctgagctgtttgacagtgagcaaatcacataacttctctgattgttttcttccttacaaaggacaacattctgactcctgcacagtgttgttgagagggctaaatgagggtctgtgagtaaacactatccaaaggaaggtgattcttgcccttctctctggatcatgcagatgttgacttttaatttaaagctttactttagatattgttgaagtagatgtggcttctaacagaagaaagttccagcctaactgaagattgtcgtgaacgtgtagggattgattttgtgtgactgtctcctcgatctgtccaggtttcccatgctcagcaggagtatctggagaatcacatccaaacccagtcgtctgccctggatcgttttaatgccatgaactcagccttggcatcagattccattggcctgcaagtactcatctgcttactgctatgacagggcaacccagcttaatcaagagtggggactgtgcctttgcagaaaaataagtcacagaacatccttagctcatgattcagaattctttaagcagaaccactgtgaagactgtgcccagaagacagtgtaggaaactgaaggaagcatttccaagctgagactctaaggctttgtttttgctctctgaaaaggaaatttagaccccgagtttagtgtgagagatgttgcttgcttcaccagatacccgagtggtcctcagcatcagtgcctaaccccacacgtcagccctcttcctccagtcccagtgccacaggaagtgccacctaatcacagaataacacagacttcactaaggacaatctgtactccttcatggcaagcaatataaaaaaggcctgtaaacacttttttataattagaaattattttgtatcagaaagaatcatggatattccacgtcttgtagtagcagacagggaaacagaaagacccggtatcttatatttgtgaaaatgcatgttgttatctcactttgaggcattgttttcttggttgatttggtttacaggagctaacccttcaagtgcttcccattcttactcttacaagtcccctaacatgcaaattaatttgaaaatgttcaaagcaaagcattgtatgtatttgaaatagcttcccttggtcttcatttccaaatgtatgaacaacagtttttacctctcctccaaatttatttggctcttatctttttatcctcctctcaaaagttccaaaacctatttcaaatcctttctggttctatataagtaattttagataaataaattttcatgttgggattctccacttcccctaattctctgataacagttggtatggcagcagtgacaacagcagggctcggccactgtcctggagtgggtctgggtggcctcgtgtttggggtcatctgcgatgcccatttctggtggggcttctgagtcccacccttttcctggctctcttgagtgtatgccagctttcccctggcctcaggccaagccccactgggtctggtttgctcagcagcctttgttttcccttcctcctgtggtcgggggggcttgccaaggctccctttcctcccctttcggacgctgtctcattcccagcccaccagcaagggctttatctcacctgagttcagacttagtcggtatttgtactacatctctggtttttcttcccagaaagaaaaatatatttgccagtattttctggcaattcttgtgctttgccatctggccaacactctggcatttactgcagaggtcagctgtttgagctgggccagctctgacccaggcaccttgactgattcctagttatcatgcaggctcttagtcctggacagccaaaggagccttatagctaaaaccgctgagagaaacagaaagagagagacaaagagagagggagagggagggggagggggagggggaggggaggggaagggggaggaggaggaggaggagaaggagaaggagaagccatctcacagcaggaaactcaacctggtagaggaagagggctgatgcacggtgttaggcactgatgctgaggaccactcgagtacctggtggaccgagtctgaagagagctggcttcttccttatgcaagaccccagcctcttccactggcccactctgtccactttcattattattgacagggagaccagacccttggtttgattccatagaatgtcagagctagaaagaactgagaggatctcagttttatgaatagacaaactgaggccgacagagagaaatgacatgagcaagatgcctacctagtgacagagccaggattagaaaaatcctggtctcttggaccagagtgtaggtttttgtgtggatacacgagtagaatctgtgaagccagtggggctgggggagtgggtggctggtctaggtggtttctaaagccccttgaagctcaaatgttctgtgactccatgcttccaaatagcttcagtattttctttagtatctaatcacctccttcagaaattctttttcttgattcaagtaggtttaggagtgaaaggcttatattgtccaaagtagaggctgaggaattgaggaagcttcagagactgatcatctagacaagagcacagaggtgttagaaacagtgcccaacaccagggttttcacatcttctaatgtgaaattgtagatgactggggacacagtagaagatgactttccaacggcacagattctgtggaggccatttatctctaaggagagttaaccaagtagaaaccaaagcagtaaatagcaccaccatttttttctttttcttttttattatttttttagagatggggtcttgctctgttgcgcaggctggagtgcagcagtgtgatatagttcactgcagccttgacctcctaggctcaagtgatcctcatgcctcagcctcctgggtagctggggctacaggtacacacaaccatgtctagctggtttttaaattttttttgtagttgcccaggctagtcttgaactccaggctcaggtgctcctcccacctcagcctcccaaagtgctgggattacagtcatgagccatcacgcatggccaacactattgatttaaacatccttgcttcagtgcggcctggagcaaaaattacttgtgcggcttggagcaaaaatcacttgtctgcattaccaaattctgttccttagtacttctttattactacccttctctgcctaagggaggaaggtgaaatgtttgcaggtatgtgagtattctcagtcacattgtcactatcctggcaggcagtctagaagcgcagaagggatagctcttttaagaaaaaagggaggccgggcgtggtggctcacgcctgtaatcccagcactttgggaggccgagtcaggtggatcacgaggtcaggagttcgagaccagcctggccaatacggtgaaaccccatctccactaaaaatacaaaaattagccaggcgtggtggcaggcgcctgtagtcccagctactcgggaggctgaggcaggagaatcgcttgaacctgggaggcagaggttgcagtgagccgagatcgtgccactgcactccagtctgggcgacagagtaaggctctgtctcaaaaacaaaaaaaaaaaaaaaaaaagaaaaagaataaaaagaggaatatctctattctataaagctcgtattttgttttctgatttcattgtggcaatttgggaaatacagaaaaaataaataagaaaatagatacccatagccctatcacatagtgaaaactatcattcagatttcctcctggtctttttccccccagtgcataaacatatatttgaaccaatgcttatacatatttttcaaaatgggattatactatacttactattttcaaaagctgttttttttcccatgtgaaatgatgtattataatacttttccttggaaggactccattttaatccatttccatccatcctaagcagtggcaagtggtgttggcagcagctatgggatggtatgggagaggttttcagtccctccaagctacaggggcagacctcttggccaccatgggagacccacagtccctcacagcacagggtcccagactggcagttgctgtagcctaggacagctaccccagtgcttaatgataaggggatgccccagcatgtggtgcagcccatgtgttttcacgccaccggatctggttttgtttttattttcatcctcacagaaaaccctcgtggatgtgactttggaaaacagcaacattaaggatcaaatcagaaatctgcagcagacgtatgaagcatccatggacaagctgagggaaaagcagaggcagttggaggtagcgcaagttgaaaaccagctgctaaaaatgaaggtggagtataaaagcctagatttattttctatgaacttttctcctctttacttctcccttttctcttcccatcttcaacctttccatttccttttctccattctcttcttcattggatttttttttttttttgagacagagtctcactctgtcacccaggctggagtgcagtggtacaatcatggctcactgcaacctccgcctcctgggttcaagcaattctcgtgcctcagcctcctgagtagctggaattacaggcacgtgccaccttgcccagtaatttttgtatttttagtagagaaggggtttcaccatgttggccaggctggtctcgaactcctgacctcaggtgatccgcctgccttggcctcccaaagtgctgggatgacaggcgtgagccaccgtgcttggcccagtttggggcttctccataaatgcccccattgggcatgcctttcttggcctccagtcccttcaagggctctttagacactcaccatggtgctgttgttatgtaactgagaagacgcttgggatgcccacagatctgggacgtcagaagccttggagatctcttccttcactgtttagattttctttgaggtcccaaggcctttctgtttggcttgacaataaagagctgaggggcacacaaatagctggtacttgggctgtaccccaagtacaatattctcaagaagaaaattggtgggtgactagggacactggggaatgtcccatttggccccctaggctgggagcattccttagctgaacttctaatgccctagaggcattagtgcccctcccaaatttaaactgtggatagacttcctacccggtgacaggagcagatccatgaatggctcctggagggcacttaataaattatatcttggatgaattcctttttatgtaagtctgtggtttgaaaattttgctcagcacagacttaggctatcttatgagtagcgtatccacatagtttattgctcaaagcagaatatgtgagggagtgaaaggtggtactattggtaatttagttagggagacaaactgggaagtgtgggccccttcacaggggtaggctgggtggggaagaggggctgccggtccaccgcccggtctctgtattgccgccctggggatctgctgccagttcacttggcctgccacagccatgggacagatcatctcctctgtatgttcacttctaatagggcagctcttcttttccgtgtaagagttactttctcagtaagagttacttggggggtgaaaaaagtttatgttgctaaaaaagcctgaaattactgatttaagtaatttttttcagcttaggggatttattcaatcattcagtccacaaatatttattgagtgtctactctatgtgtgtgtcctgttcagtcctgttggttccagaggtggcctgtcaccaggcatctggggacatcattaggctgcttggcaatctggctgcttccctggagtccaggcctttaactccagcccacagttgcctgttttagagactgatgcttgttttcatcctgacagtggagttaaaaaggtttctcctactcctcctattttactccccaaattgggaaaaaaaaaaaaagcttcaggaactcagggtatgttacatgacctggatgcagagtgaatgggcctccagggacagagcccttccagcaagctgtgcgtgcactgcaaatggagcacacagcacacagggtctctctcagctggtcataagctctgctcaggactttccactttggaacttcttggtgccaacacttacccagtgatgagaagggagaagtcaagggcgtcaagagagacttgtcacatcttggaaataacatcatgtaacctattgagtttgaagaatgcttcccttttccagagtttaggtatgcagcaaactcagctctctgcaataggcgataacctggaaggaggggatgagagcaaaccttctgcagcataaaatcaatggcgggaagtctgtgtgtgagaacgtggcctggcaaacaggaggcaccagccaccaccaacctaagccctgcccacctgcaactccactgactttttctcacctcctaagccaggcctgcttcagtactaggggtgccagcttagtgttccccatgctaggttggaatgtttccaaaagcaacatttaggaaagcacaagggtatggaaagggtgagtccagatttctcctttgagcttagctggtcttacctagaaactggcttggccaatgcaactgatgagattgcgtagagaaataagtttctaccttttgaaaaagtcactcatgtggagcatacctttgtcctgagaatgcccccaaaattcgtgtgaaatgccacttttatttttctgtggctctgctcacccctcttcctccctttccctgttaggtcttgctgtgtctctctgctgcagaacccagtggatgggctcactacctctgtgagtccccacatgaaatgtgcagtggaagctgccaattcctctgggccctgcaaaagctgtcgttctgaaatgagtctcgttgtaggtggaatcgtcccaagaagccaatgctgaggtgatgcgagagatgaccaagaagctgtacagccagtatgaggagaagctgcaggaagaacagaggaagcacagtgctgagaaggaggctcttttggtgtgtgtgttgtagctgccgatgtaaacttaccgggaattgttggttcattattgttggtgatgtatacgtagtagtgtttattcttagaggtgggtcagtagactcagccatgggtaagggatcaaggaattattcatctgctcattcactcccctcccctcttcccctctgcctttattcatccccgtctctactcagaatagccccttgtctctgtctctaaatacacacctttttctagctcatctgacaatttgccagcatctaagcaaaccctgggcttgcccgcagctgtgccctccctccctccatttggttctctctacctgaaatttcctccttccctatctttgatcttgcctaagctccctaaaagccttaaatgccactctctccatgcctggagtctcttccagtcatggagccagaaccattatctgtccttaggaagctcactcactctctctctgcttttactttggaattcttttatacctgccattagagtggggctgtgcgtctcacatcttggcttttccaggagattataagttcctgaaggcggggactccatgtctggctcatctgtgtccgtagaggcttaatacatgttctgatgattgactgggttttcttgttagtaatgagctgatgtattgcattatgggagaaggatctgggaattctgcattcaattccagatctggttctaattcccttacacttctggcaaatacagtgacattctgagcatctactcaatgttattaaacatttgtaggcctcttttacaccttttggatataaagacttaagggaaaaaagggaaaaaaatgtagtgaggcccattaaccagccacatgatgtatctttattcataggtgagaaccagaaccgtgaggttgagttcatgatctgtgagacactttcaggttccaaggtcatgttttaaagagaaatcgtgatctagcaaggcctgagctgattggatcccggtgagtagcctcggtactccatgcctgtacttaggagggtatatttcttttgcaggaagaaaccaatagttttctgaaagcgattgaagaagccaataaaaagatgcaagcagcagagatcagcctagaggagaaagaccagaggatcggggagctggacaggctgattgagcgcatggaaaaggtaggacacagcgttgggcctattgcccacttgcccaaacttttccctgtaggtccatctgagatacgagaggccctggatatggattcctctcacctccaaaatttgcaattaaaaaaaaaaagacaaagctataaaataaagtataaggaagtccaacaacgttctcatttttcccatgataactattttgatgcttttaaaaaatattacttgtgaaattctttagaaaaattaatattttagcagccttgctttgctggtgccccaggtgtgaacttagtttatccattgaattatcaagccctatttaggtgttacatcaacacagcagccctgttgtttctggggcatgtgtctcaagggttggcttttccttgacacgctggggacttgagagagtagggaggccccatttctctaggtgttgtaagcaggctggtgagtgtggtgggggaacctgaggaaggcgggagctcagctgggataatgaagcctgtctagtgaaagggaagaggccaggaattaagtaggaagtggaggaaggggaggaagtggtgggagaaaggaaagaggaaaagaaggaagagaaggaagagaaaggatgggtgacctttagcaggtgacggctgacttctggacccaggagttcagggccaagtctgtggctggtttctgggaatggctccctggctgcatatgagtttgcagagagcagtgacctgccaagaccctgacattattagcaccctgtgactcattcgggatgccaagaatctccaatctgatgatggaggcagaggtggggcagcaagagcaaggtcactgtcaggcttcatgtgatgctgagaagaggtcgccttagctaatggtgtttgcagcataagcccctgtactgtcccctcataaggcgaggtgtcgccactatgggaactgcatgaaattcagttctgtggagcttcagagctcactgggtgcttcgttttagctctttagctttttacttgggagagacttgggcaaactaaagagtcaattacaatctcccttctaccccctgggaaaacagaatcccatcttttattgaagagtaggtgattggcttagtcaggactaacattagtattgaccagagggggtggtggtgaagattgggcaacaagggagctttctagagcttgagtgagcttcctcccacattattgtcctcctacaacagcagaagatcccagttaactcagatgctctctctctgggcagcaggtttttctgcagcgtaaagaagcaaggtgagccggcagcatagcagggtggtctgggggagatgccgtcatacagagaaaccacaggtagtggtcatgaacataggctttagaatcagacagtctggggatttgaatcttgtgtctctttgtagttgtttgcacttacttggtttttcctaactcagtctccacttctgtaaaatgctgataatggtacttcttattcttagggcttttgtgagcaataaatgagaaaaatccacgccaagtgctaagcatggttcctcgtatatagtaagggttcgatcatttgtggctatgatttttactctgttacgaggttgcctaaatgtctaccctcagagtcaggttgtctttagcacgacccattttatgcttatcttcattgctgtcttgaggttctgaaagtttcttgtctttccccactgattttcacatggagccctcatgtgggatgaatgggtagagccaggaagctggtaaggccagccctccctgccagcatttaggaaacacaaaaccttccccaagtggtgttggcttcttctttagtgattggaaatgtattgtcctttctctaaatcttcctttccatttaggctagagaaatgctctatttattgaactaacattaggtaggccaatttacactgtttccttttcagggataaatctgtgagagcaggaatctggccaaatcgctgtctcacactacgtgaacggcatgtcctaggcagggctgtggcagtgtacgtatcctgctctcagttttggattttgctcaaggacaaaccatgtgcttttgaatggcttctctgccatatgccttagtttactgtttctcttgctgagcactgtatttcaaacacctttttttctgatcagtaaaaatcttttaaggagtgttctctaccagggacccttctggggaacagataatagtctatgccataatctgggcagtggtttcacaggtgtttacaaatgtaagaaataattgtgcagtgtacacttaagatttattgtacctcaatttaaaacaaattttaaaagtgtgctgtaagttagaccttgctctactttatgacagcctttttctttcttgttttttgttttttttttctttttggagggaggcattcacttgtgaaagcttttatcactgttatttcggggctaatgtaaaacttccaaccacataggggcaggaggaatgttctgctcaggccaggccataagaatgtgcatttgctgtagagatttaaaaacagtaacaaaaccccagtcaaagttgatctacctttgttattttaaatatttcagagataatatattcttcctgcttaaggtggactgcttccccacccctttggcctacctcttggtataccactgcttatagcttcagaagttgtggcagttaaattttcaaagatttgcttttaataatttggtagaaaagaggtttggaatctatgtagctagtaagagtttgctgggtggaatttccgaacataaagatgaggaacattagttcttagagaaggacctaaagtaaaataatctcccaattagtgagcgttatttgataaacttgcattttaaggaaatttgttacactaacatctgtaatgtatttttagcacaatttcggttatgacaggcaccatgtttttatgaacatttttcagctttgtccaaagaaatgattccagactcttttttgggcaaacttctaaatatacatatatatagcaaagtgtacaaagtgcacggcttagtgcgcgtatgtttcctattgctaccatagcaaatttccacaaggttagtggcttaaaacaacacaaatgtattatgttccattcctagaggtcagaagtgctaaaatccaggtgttggcagagctggattccttttggaagctctagaagggaatgcatttccctgccttctctaacttctggaggccacctgtactcctcaacttgtggccccctcctgcagcttcagaggcagtagcagagcatcttccaggctccttctctctgattctaaccctgctgcctcctcctccttagaagggcccaactggataacccaggatctccccattttaagatctttaacttaatcacatctgcagaattcctttctccatgtaagataacacataggattcaggaatcaggacatggacatctttggagggccatgaatctgaccacaacatatttttacaagtgaatacacctgtgtaaacaccacaagttagaatataggatattgccagaatcccagagcctcttttcttgatgattcagaaaataataaagaattttgcagtatcacaagccaccagtttaaagtattgataatcagtatttggggctataaattttcactgatcctgggctgatggaatactttggaaaatgaatcttgaatggttttatttaggatgttttgtctctgacccataaatatatctataaatacacaacaacagacttggcagttttgagccttgtttgggctttgctgagcaggtgtgtaaaacccagggggtgtcatatagacttggactccctagtgctagaattgctaaatagacattctctgtcaaacttgggatccattgattaaaatatcagtttctgtttgttttaggaacgtcatcaactgcaacttcaactcctagaacatgaaacagaaatgtctggggagttaactgattctgacaaggaaaggtaagacgtaatgcctttcgtcttgtaatggatttaggttgtggacacgctgtgtttttatgacctcatttgacccttacattttcatttgtgtggttgtaccttattacagacttaagcatacataacattgggctgagagtttccaatatggaacaagtttctttggaagcctccagccacatcctgcagatcatggctggttgttagtgtagtggaacacatcaaatactttcacaagtgcaaaagtttggtctattaatgttctccatggccttgaactccacaggatacaccttgttgatgagaaaactcatcagctgtgactaataccacttgctttggaaaccaatttaaaacatctttctttgtttccaaactttgcttagtaaaaccttgcattatcctctggcagtgagtatataaagccctacatgaaaaacacggaatagtacgctgtctgttctagaaatcaaaatgcagagaggccattcaggggtctctagtgaaggaaaacaaggttgagatgatttgagtgttttgggcaagtgacttaacctccctgagtcttgcttgtgccacatggaaattcatctttaaacgggggagacgggtatgacggtgataacagtgcccatctcactaggttactgttgttaagagaactattgggcttgctgcctgccaaatagtacgtgctgaaaaaatacccatttttccttcctcatttgcaatttcagagttttcaaagttacaggaggcttgctagtcattaacatagtgctgaggcagagatggggcacgggaactagaccaccagacctttcctccagtgcccagccccagcggccccagagaactgaagagtccaagcaatgttggagaataaattgtgctgttgtaaaacaaaagtatgaaatgttttgtgatgtggcttgctctgtttggatgtagagaaggtctttcaacttgtcccacatttgccaaaaataaaggatatgtagagcaactgtgattccagaccttttggtattctgccgttgatttcagatattttattgtgttgctggaccccttcttccccgtcctcccctccaagtaatttactggatgttccaatatgttaataaccccaaaacagagagcttctcagatctgtaaatggtgcaaaaaaattatctctcagcccctggaaaataatcatccttatatgggataaaacttgcaaatgggaacttgaaaaatagtcctgtgctcctctgttgtggtagtttgttagtaatcacactactttgtgtggtcatcacataaagtaagaagaatggatcttagagtttgatttcttgttcttggaagcatttttaaatgtttttaaatttacgtttatttttttaccaaaccttccccaaaagatacatgttttctatttttatttatttattttttttttttgtggagatgagggtctcagcatattgcccaggctggtctcaaactcctggcctcaagcagtcctcctgccttggcctcttgaagtgttgggattacaggcatgagccgccatgcttggcgctcttggcaatattctttaaagctgtgactgttgctactgctgttgctgctttggtttaggactcatttgcttttttctcctatttgtgttaggtatcagcagttggaggaggcatcagccagcctccgtgagcggatcagacacctagatgacatggtgcattgccagcagaagaaagtcaagcagatggtcgaggaggtaagcatctgcaaaaggtcacaggcctgggattgcttcctgtggtggggaagcatccccagaacaagtctgccttgcccctccatttcctgtggctcacaagccgaggtgctcaggccactgccatctaggcccagagtgggatttccccacatgtcccccatggactgatgacgatgatgcccctaaaagaggggtttcctcaggtcaaagggttacagttaagaaagctggaaagtgcagttcataagctcacccactgtgaaaggacagtgatagcctgagtgggtacccacagctcaggggacccaagggggtgatgggcagggtgaatttagcccaggtccctgcactgcctccacagccgtctgtctgtctctctctctctctctcagctaccattcttgtcctttatcgttttctgggtgtgtctttcattccctttccttgtctgtttctctcttttttctccctccttcctcgttctcttctcccactcctgcttcttcttccttttcctttgccaccatcctttctctcctaactgtctctgtaacaggaaaccaagctatacatttactgtttgggcatagtttactattctcttttttctaaatgagaaaacgggtaagttgaacatttctatttctctaagaggaacaaaatttgttttaacttgtgtcaatataatccgcctctcttgtggtgatgttccaaagaagaaagtccgtgctctgtaaagctaatcacatattattgtagttttcttcttgctcaattaaaaaatccgattgaaaaatctgatagaaaaagagcagttagtactaacagggttataagaattcccttgagtctaattctctaacctgcaaagaaaaaaaaaggtttcaatttaatcaaacatttggttggcagtggaaaaatgaaaacacattttccttatattaagtactactttaaaaagttatgttttattaatgaattattaaaattaaaagcatatctacttctaagaaataattcatgtacatgacagacaaatggaagattaaaatatatctattttattaatctctaagatattggggatattaatgttggggagttaaggtcagagaattgtgagtatgggaagggacatctttttttattgtgtgtaggataaacatacacattagataaaagtttgtccgcaaatgagaagtgcagttatactgtgttgaatcatgtacatcttatattggttcacacacaagtttctggggagcagtggaatagcagaggaggccacgcacgcatctttgcaatcgttttgtgcatccaggcaggagcactgcccataacagtaatgcggagggagatcctgccctatcgtcaacactaggtagatgtcaggagtgtattttccaaggaaaagcatcactttgccacagttagcatctcagtgagccttggccgtcggggcatagtttttctgcttttgaatttcacacgcacgaagtctggggcaagggcatcccttattttcccctatgcgagtctctaactgtgagcactacatttctcccacctcaccacaggggggtgtctgtgtcattcttgtatctaatcgttagagaactattgaacaaaacctcatactggttggcttctgattcacttaaacccttacctgtaagaggttaaggctgtaccagaatcagagacattgtttttttaaaagacattttcaaagaagtttagaattctctgtttcctaacttacttccagaatataacaaacctaccaatttgaagagagtgaaggagtacacatacgtacacacatatacatatgtgcatatgtatatgtgtatttatacatgtgtatacatatgtatatgtgtgtgtgtagggatgcatataaagatcactgtccatgctttgcttttttctacctgtgatttcatatcttccagataagcttctctaagctttgatgtggtctgtggtctggaaggcccagtcgttggaaagaaatcaccagctaaaatttaggatgccatcagagttagcaccccctaggggctggctgggtttccacagtgaatgtagaccaccaccaccaccagcaacaaaaagagagagagacactttttattcctaataatttttactgcctgatttagaaagtttgtgtttgcccagcatactacattaacttacataagaaaaaaaggatagcctagaatctcatttgctatagccatttatgtgaatattttttttaaaagttagaaacatggtcaaggggcatggacaggtgagcaccttcagaagagcaagaccaggttggaaaggagttgagaacctgagtaattcagggaactggggaagacatgcccaaggagagatgggagctgaattcacatcttagaaaacatgagggaatatgtctttgttttgtattgtgaagcaaggccaggccagaaccactgggtgacactttcaaagaggcaaattgcagctcttcattcacaacaaagaaaacatttctaatactggctgcactggtaaggcatttagctcttcatcatggttacgttctttacaaagtaagaagttgatttagaagttctctagtgttcctccacaaattctgtgttctgtaaccttaaagactgtgtggaggaagtctggtaacttcagttaagtgttcatcatataaagaattctctattgtttactatgctgtgcctgtttttgtgagctcagccttatcattatgttgcataatgagcaaaatcagcaaagtcgtaactaaatcacttcagatcacttggagcaaattttgaaaaatccggagtactgaattggtcacttgtgaaatgaatcttgaactctgactctagaagagaagtatgttttcatctgtgaactccggctccccaggcatataggcagcctttaagtgtagcggatgttaaggaccctttttcttccctcacatgggtctggaagctcgtcttcatcatagcctcactttcaccatggatggaagtctcgtctccatccattgttggtatcattttggccataatgtccatgaggaaacttagtttttttaaatgatgggcttcttttgtttagctcaaaatgtccaggtgtcactactgcgatccttgggaatccttaaatgttaagcaacatgtttcttctcaccttagtggagtatcattttatcatagtaataataaataataaaaagtaactggcccaggttttgtcatccttagctcattaatgacttgatttccatggtgggagacagtaggacttgtactatgtaggaagggctcatggtgggggtgagcccttttgaaatgaaggattagtatatatcttacggtgtcaaggtcattgagaaaagataatgcaaaacgttttctgtgaaatgtggaaccaagtccctctcactaggctagggctttctactgaattaagtctcctgtcatggatgtcagggggttgggtatctcccccatcactagttcttccagctgattctggctttgataaaaatgagagaacaaagccaaaaaagccccacgtgtgcctcttatagccggaaaatatagaaaaatgccgagggattggaaagaaaaagccctcaaggggaaattaattcattcatccattcagcagatacccaccagcacccgctccgtgctggggctgggtacacagtggggagtcaagcagacatgggccgtgctggcacggatcttacccactggtgtcacccgagttccagggtagtcttgcctttgggttttattatcctgttgaaaagctttgttgggattggtctttggtcctgaatcaagctgcattctttagattgccaggaaaggcactgggagagctgggaggagtgtaaaaagtaagagagcatcctgaggcccccacagtgcccctctgctcacacatctttgagtgtgacttcttcagtccacagagtcattcacaccctctttacctgctctcaccatggctctcctgctgccaaccaaagcagctctcctgccaaggggaaagtgatcttaaggaaaaaatcaactatttgccttccaagagggtgggtttacatttttgccaatgggcagggatattgtttagctgaataaacagtaatttcttaagaggttttttttttgttttttttttttttaagctatatcccagtgcagccattaggcatcctttcattttgtcatgtctttcttttgatttccctttgccatttgtgatataggaaatgtttcttccaacagggtctgaagggagtttcttttcatttgcagaggaggcattttctttagacttcttttgctgaaagcaattacactctaccccactttgctataattgagatgtttaataagtgcaaaggtgcaaggaattgattttctcattagtgcttctccacccaagctacacattggaatcacctggggagctttaagacatgcctgaacctggcagatgggatggaggcagactgagcattgggttttgtttcgttttaaaaactctgcaagtgattctaatatacagccaggattgagaatcgctgtcccggattctcagagcggtggcctgactctccttgctgggtttcatgttcatgcatttggccagcatccctcagaagctcctatgcctgaggtgggaagctgctggtgaactcaataggaagggctcaacagaaagcaagccagggagacagtcaccagggaccaggagcacagaagtgagaaagctggtccaagtctgtgactctctgggcactgtcaggggaccttcacttcttgccagcccctggtcctgggaggattctgtgacagctcactctttttttattttttattttgttttagagacaaagtcttgccctgttgctcaggctggagtgcagtggtgcaatcataccttcctgcagcctccaactcctgggctcaagtgatcctccccactcaacctcccaagtagatcgactataggcacgtgcacccatgcccagctaatttttgtattactgttattattattattattttttatagagacagggtttcactatgttgttcagctggtcttccaactcctggcctctagcaatcttcccatcttggcctctcagagtgttgggattacaggcgtgagccactacacctggcctgacagcctaatcttaatagctgtactggcctggtggtatccagataatacaaacttcccaaaggctatttagacccatctagagagatgttactaaggtgggaagaggtacgcttgttaaatagataatagaaacttaaagggacagaatccaatccacctaagtccttgaaagctggactaccactaagagagactaagggtgattctcatggatcctcttccaactgtgcatgtatgcacgtgtctgcctcgccctgctttaaattattcacttctgtctgtacagaagacgttacacttggccacatggtacccctttagaaagagaaggcaaaaacatcttggttaaataattatattagcaatgaccacttctcaaattcaaggcaaagcagaatattatttgtgattcctaaggaatgattttgaaagtatttaacggtcatctcttagattttttttaaagagtgatgctgtagtcataatgcagcagttccttgggggaaacaaactggatcagggagaataacagatgagtaagaactcttcagagagttgagactttgagtatctggctctctagccagttggccaaacaaggctttacattactagtccctaaatccacatgcatctgcagttagagacctttatgtgtctacaacaaaagatggcctagaaaaatagcaacaagtatggactttagcatcagacaaacctgcctttgaaaagttattagtttccttgtctataaaatagggttaataatagtatctacccaattttttgtaagagttaaatgagatgacatgtataaaatgcacagcatgttaattggatcataagaaataataaatattagtggctgttattattaccacctgtaaatgggttcggctgtgtatacctaaagttaagtgaactaaaagcaaaagtagctattgttgatttcctgagcaatgcacggggctgccctttatctttccctttgggagtcttgttggccacattcaatctttgggtatacttctctcttctcttttgtgctctgtgctgttttctagcttagccatcaatctcttcacaagaatatttatacaaaaagcgatttttaagatttaaatttgcttcatcgcaagtatctgccatttttacatggttcagtcatttgctggcacacaatttaattcaaaactgttgtgtggtgtgctgaaatgtgcaacacacgaaagtacattttactaaatgccctgtgtttagaggatttcaagtacttctcataattggtaattagccaaatgggggtaggggaaaggagccatagcaccaagcccacaaacctaatccactcaattgaactgtctccagatcatgtcgcacgagctcttctccagatttagtctccggctctttggaagatgataagttggtagcctgctctgggttggaagcgattcctttattgttcgtgattagaagaacacttgtacactctctgctgggaagaggtggtatttatctatgatgagccaatgaacaaaacaggaaggacatattatttaaaggaaaatttgaccatgtggggctcttgtttgtgaaaacacccacatactgtcaccctgacttgtacagcctcaaactgcagagtcaagagaactcacagatccacagagtatttttaggaacttgagtagacattgaagaaggaactgcaatgaaaaaggctactgaaaaaccattcagaaagatccaggtggaggcttggaagatgaatccttacttatggaaaagctgccaaagacatctgctaaggagatgggaagagagcttgaagaatgttagtgctctgggaaggaggtgctcccaccagatcacccccaagaaagtacaggagcagccaggtatccatgtggtttggttctatttgtatatgggaggtggccctgaaggtgtccttcctgaatggatatcaatactcatcttaggactcttctaagaggagtttagcttgcttctatcaccatcagcattttgcctgaattggttcaaccaacttcacgaaaaggagtgtatctgataaagagaaatctatctggctgaaatatgttgaactgaaacatccttcatgtatgttttatttttatagaggtctttcttgagattgctgcaggcattggtgttttatcagaacatggcagttttgctgagaactagcagtagtagctgcagtcatagcaatgggtggcatgagtctacataagctgggagatggggctcgtggagtgagtgcgttcagaggcccagtgtccctcagacgttggctagttctccactcctatcactccttcatggcaaagcaggcatgaagctgctttcttgctaatatttgcctttgctttcatttagatgcttctacccagcttaagcaaggagggaggggatgggaaagaagcagatgaatacttttccgcattagttattaaccattaatattgttcacctgtgcacggtgctgtgtttagacacagatccccagatacgatgctgggtattcagacttccactagggagacagaggcagatttgagaatctcatctggatgttagcttagtgttgttacctacactgttttttagggacgcctttattgctgtaatgtttttctaagtctctggtggaaaagtcactggcatttgttctagcagcattgattcattgccaagttttaaaaaaggaaataattaagagaatgcaatgacctttagagaaaacaggtcacccatgtaagtcctgctttcagggtggtgtgctttcttctgcttttagagtttcttttctcttttgggctatgaaccgtacctggaggccaggcaggccttattctggagcagatagtgagtgaggttcctagagtactgcatagcctgagagtgcctcctaagtggatgccctccacacctcctgcacttggccctggccctgggtcctaggctcattgttgatcttcttagatctgggttccttgcattgcaggacctacctcagcctgctcttgtctgcctttgctgatgcccctcaattcacctctttcctgcctgtactgtgatatggtgtgaacttgacttatactgcttgtgaaacctgagtcatgtgctgaaatcctgccccgccaccgctttcctcccttaactggatccttagccttggactccaaggctacagctctgtctcgtggccactcaagccccacccaaaggaggtgctactcaaaagtttgaggcaggagtgatttattgtgaatgacaatgttatagtttctaattctagtgtttagcatggtattattccttatttattttaaaatcttagacaatttatctaaaatgtcaatttttagaaggtatcagcacaattgtggcagccttttttctgtatgtgttatatgtattatttaaaaaagcaggttcattctatgacaggtattggtttcggtattcacaatataaattgtcttttcaagggaaaggatattttctttggaaatgtcattgaatctatgttctctttattgaaattgttctaattgactttgaactgtttctcagacacctggtgcccagtttctggccatagaaactatgtgaggctgagtaattcatgttttgggtcactaccagtcacgaatgcttctctcattccaaggctatgcatatggatgtcacattcccatgtcaatcatctctggaaggtattattcgcccagttttttaagcatgggaaactgaggcttagagtcttaaaaaataagtagctggcagtctctcagcaaataatgatggtgctgcactacagacccagatctgtgactccaaagtcagcctttgttcttttcttcttgttacttttaattggaaaaaaatttaaattgcaaaaagttgtagagtgataaaaacaaaaatccacgaatgctcttctaggattaacaaatgttgccattttggcacacttgtttctgtttttttttttttttttaaagaaaagaacacatcacagataaagaagaggttctctttttacctgtccctgattctgttccttttccttctttcaccctctcttcttctcagaggcagtttggtctctaggccatgccttgatgattttactgtgtatatatatatataaaattagtatgtggcttagtttgtgttttaaattttacgtaaattttaatttataatattaaaaataaattgtattgtacatattttgcaacttatttctcagttttgtttctgctgttattccacatagatctggattattcatttcaatggctaatatccttttatttgaatatattgtaacttatttatcctattgatagacatttttattcttttacaaacaataccaacatgtctccaggcttctctaactaggaagtatacgtaaaggaggaattgctagggcatgggattggcataatttcaccttttctagatattgcccaatcgctgcccacagtgcacatacctttccaccagtcacatgtgagagggcagattttccaaatgctcatcaccacttggcactgtgtggactataattttggccagttaggaaatggcatctcattgttttcatcttaatttgcgtcagcctgattactcattgaaacttgtgaggttgagaaacttttcttaagcttattggccattcaagtttcctcctttatgaaatggttgttcatgtcatttgctcatttttatattagattgtttttcttttttccagctgacttgtaggaactctacatcttatcaatattaatcatttatcgaaaactatttgggtgccattatcttctcctagtcaatgttttttgtttgtgatatcttttataatatataagtttttaatgttggcagaagtaaagttaatctttttggctgtgttgtgtgtcttgtttgatgtaaagatagtttctgtaatagttttgcagtttgattgttcatctttaggtcttcaattacaacctgcacatccatcccctctatcctctttcttactctgtttttctccatagcacttatcatccaataatatgtcatgcactttatttatctgttttgcatatatattttgtctgttacctgtttccttccactagaatgtaagtcccatgagggcagggacttgcatctattttgtttgtggttgtatctctaacacctgggatagtcactggcaaatgatagttgctcaataaatatttgttggacaaataatgatccatgtagaatttatttttgtgtatcatatgaataggactccttttatttttggctcacggaaagcttgtttctctaatagcattgccgtactgatttttttcacgtcgctttcgtcaagctggagttgtttcccctgtgccattgtctttgaacaatcctgttttcctgcccctctgctgaagactgaaggaaactcattccttgggcttaagagtgggaataaggatgaggaggagccaggtacaatttatggggagcttatgggacagttggtacacgtttaagaagagcctcttatgagcatgagtgcaaaaatggacatgagttcctgctctcagaggaccttctggctgacatttaaactcatttgaacttgaggcagaatgtcataggtgctggaaacacagaagctgggaaacttagtggttaagttcataggctttgagtaaattcagtctgcttttgcatcctgcctctgctactgactaggctttgtatcttgagcaaattatccaagattcagtttccttatcaataatatgggaatggtcataacattacctcctcaagtggtagttatgaggattgactgatgtgatgtgtgctaaatgcttagcatagttcctgccaggacaaactaattctgatgtgggtggagagtctttagggaggaggtagtgtttgaccaggccttgtaggatgggttggatttttctaggcagggattgaatgggtggacatgtcagacaagatatagaataaataaaagcaaaaacatgcagaccagaaagtatagggtgagttcacagagcattcatctagtttggatggtacgagggagtgagaaatgaagaggctagaaatataggttgacaccaattgtgatggtttattagcaccaagccaagaaggatgtccttcatcactctgctcataattcctcaatggctccccattgcctgatcagatatgagctccagagtggtggctctggccagtgggtgctgggtgaataggaggggagaggagcacggaggacagcaagaaggctccaaggagagccctggctagtgctagagagtgtttactttccatgcacttgaactttaggaagcgcttccaaaatgcaattttttagcatcagctttgtgccagatgtggagctaggggcttccatatatatgtattacatgaatttgaagcagttcactcccttggacactcctgttcaggatttggtgttttgtctctgaaactgaattcatcgagaaaagcacaggggtaaataagcttcatccccatctccattccatctgcctcctcttgaatcatagagggaaaaaaaggacagcctaaagaattagggccccagcagatcctttgtgacagaagatatcacatgtcaaccttcctcccagccctgccaactctccaggccagctttgcagccataggttgtcatcactgggaggatggaagcaagcaaacctctgaacagggtgtggtgtgaataggacagcctgggccttgccctcacagatgcttacttgggtcgtaatatcagccctatcagcatccagatgattgtgaagggagtgaatgaatgatgaaagtcttggcacctcagtttcatggtctggtggggataaccacatagggttgtttctgagaatcgtgagctaagccagcaaagttcctggtagcttgcatgctcctcctttcttccttctcagagaatgtgctcagattgggaagcagtttaaccgtccttccctgacatttgtacagccaagtcatgtttaggtacccgggggagccagagtgctcctcctctccttctggagaagttgggttatctttaatataagatagaaatcaaaccaaattacattattttacctcagaaccccgttgcaaccgatccttttgaatggtatagttctattattatatattacttcaaacttaataggaaaaaattgattaaaatatgtgccatgttcatatctagcctggctgaatgccacaagacacattaattgaaaatgaatttccacaaacccaatcaagcatcatgaagatgaaaaatgtacctttttccctccattccttcattgatttttcattttccccactcagtgcttcatttagcaatttttcagtttcgttttgttgtggccttaattcatttcctttactcccccccaaatgagataatgtaccattttcttcatgcttattaaactcttctttcatgctgcattagtgcagggcagattctgatcttgtcatatttctctatgcattattttttttgttaaaaataggctgagcttttttctttttattcttacattttgtggtggcttttatcaaagagaatggactttaaaaaatacagtaactatgaaattacgatgttacaggacttccaaaatagaattaaggaatgctatgcaaaaataaaacactttttctgaggaagagtgtaaaatatcaattattctcatagtcacagtgggtatgtggggaccagacacaattcctcttttgttaagagaattggaaacaatggtttaccagatcatagagggatcaagaggctgggttaaagacacagcactgtcaggaaaagagcaggcagagggagacgacggctgaagcccaagtgagctctagaaggttctgtccctgacccagtcagttcaccatttccctggatttctaggggttttgaaaacaataatggggatcttcaaagtatttccttgtaaaattttcaaattttcaaataacgtgatggcataaatttcccctgaaaaggctgtaagaactcacaataaagtatcatattcctctcttttgacctagaattcatagccctagtaatctcgttttgattagatgctttgattggcagttatacatctttgataacattttcaatgtgaaatgaattattctttcgttaaagccattttaagcagaatgtctataaatgagggcccacgagaaggaataacaaagcaggggtgttggggatggtggctggggagctttggtgtatttattaacctgtggttgagttttgcgatgtgtgcaagtacacacagccccgacactctgattttgaaaacaatgaaatgaaaatgaaatgaaaacattataaagaaatttcaaataaaataatttaaaatgtttattgcaggggaagtttatgccattacattatttgaaaatttgacaatttcgcaaggaaacagcttgaagttccccatagaaatccagggaaatggtgaactgactaggtcagggatggaattttctagagctcactcaggcttcattcatttaaaatgaaaacaaaataaaacaaattttaaataaaataaacaataatgtcaaataaatgttcaaataaaataaacttaatgtggatttaaaatactgaattccattttccttataagatttaaacagtttgattaaatgtgaccatcagttttgtttttcgttttctgtttttaaagagtttatttgagcaggcagcaccaggccacatgcaattgagggcttcacctagggggcttgaggggaaaacttttataggtgtttatggaagcaagacaaggaaaatatttgattggttaaagcagaaagtccctacttaggccacacctgtaatcccagcacttcgggaggctgaggcaagaggattgcttgaggctgggggtttgaaaacagcctaagtaacatagcgagaccctgtctctacaaaaaattaaaaaattagccaggcatagttgatcacacctgtaatcctagctacttgggaggctgagatgggaggacccattgagcccaggagtttgaggctgccgtgagctatgattgtagcactatgctacagcctgggttacagaggcaaacgctgtcaaaaaaaaaaaaaaaaaaaaaaaaaaaaaagtccctatttagaggttagaggttagttggtgttttctgattggttaaatttaaatttcattttcctaagctgtgaccattcattctgacatgggtttcagtttgcttaggtcagaacccaaggcactggagccacctcagcctaatggcctcccaattaattattttaatggttcccctcttttggctagcctttcatttgtgagagattgatcaagttttagtgtgacatcttctgttaccatcatggctggttttcctttgtttcagcgggaaactcctaagtgtgacgtcagttttaacctacctcctattatcagtaagagggggcaggagggggagttgattctacacatgacactcccagtacataatcaaagtgatgtgcaccttttatatgctctgtattggtgtgtttcctgttttacataaggcatttttcgtgtttgttatcctttgccagctggtgaaagaaaataccccaaagcacaatttcttaacagcccatgtcaagcgctgtctggtatttaatacttatttgctgctgtgttttcttcattaatttctctccaagttcaatacggagttatgtttcatgagtcttgcacaattgagtgctactcacatgactacaatgctacagccatctcattttctgtcctctgatgtgaaatggactgtgtcctacatgttactaatgggaagaaattccaggaagttgagaagcctcacaacttccagctgtggattcctcactgaatccataacagaaccatactacatttttgtacaatttcactttggtctggttgacgtataagctcttttcaaaacatattggggggactttttttttttttagctatagcaatctgtttctaacgcagtttttatttaaatgtgcagattggcaagggtgatttcagctcctgagagaagttatcttttatatgagataattgatgcactaaacacttgttccctgtgggtttggggtctagtacaagggaaaaaagtcaactaaggatggcagtaactatgatgtgtcctaacaggggtaggttcaaaggctgagctatcacagagaagggggacacaaaggcagcctggaggacttggaaagcgctggcctaggtgactgtgggtagattgtgacagcagcagtttttctggtggaaaaggggatggagggtggggaggcattcctaatggagccaccagcctgtgtgttcaaagtcctggaggcgggaccatagtgtgttcatgcagtgctgagaggatggagtgtcctaaatatagggttcattgtagggacaggatgggcatgaaatgaaagtgggaaaatagggagcacagcggaagggcctcccgtgccatgctagtgagttcgaacattaaaagcgtagggggtttttaattgggagagtgagatagtctgcattcctggtaccagagcacctgtattttgtaaaagctccctccatgggtttccagcgtgtggctatggttaaggatgattacttagctcaaaccacctatgcaggtaactcgattgtagctaatgtgaaaaaaaaaagccatgatcagttttaagaaactaaaagaacttttatttcccctccctccttaaatatcaaactggcctgtattctaagagactaacatcctgcatgattgatcgggctgcaaggcccatattcacatattcagtctgagttacaaagaaacatactcatcaaaagaaaaattagaaaaaattctattaacatcagttaaaaggtcccagattttatgaaagtgtatttttccccttgttctataaggaggcctactgttttgtatttaaatttagctgttgcaagattctgttcttgtataaatcaaataggtgaggtccagaaaatgagtgcttctaatttctcagttcttaatgccctggtttgagtttggtaacttgcgtcatttaccaccacctggtgacagctagaactaaatgcagctttgtgaagggtaaattgaaggtcaaactttaacatttaatgcatcaagaagtgagatcaaaggtgcctaatggatttcttgcataccagctatatggtaacctggattttggagtagctcctgatttgggggttgctctggggacatgtgtttagcaagatcatcttggcccaactgggcctccaagcatctgatccagacagttttccccctgaagtctatgggatggattgtttaggaatggctggatggatttgttgattcattcatttgttatctgagaatataaagatgatcaaagtctttactcttgggaaactcacagcctagggaaggagaaacatcagtaatcatataataatagctaccttttgagtgtttatcatgtgctaggtgctacaagagacaatatttcaaggttctttgaagttagtagtcagaaacaataccagccacacaagtgtgtgacttaaagtttgtaaaaaatgaaccaaaggcttgagagtcagatgttcctaggaggctatcaaacccaggagcatgtgagtctatttattttagaagctgagtgcgtcacttgggaaagggatgggaggttcttcggggcagaccactggggagactaagttgggattcaaggttggcaccccttggggccggcagtgcactgactctgccagccttagcatccttagtgctcttatctgaacaagtcaattcagatcacagaatatactagaaaagaagtttctgtaagaaatgttccaggataaaagcaaatctgcacagatagcattaattcagcacaatagcatacttgtttcttggagcaccattgctgaaaaccatgagccttgttagaagctgccgcaccctcaaatcctactcctgtccagctccttctccccagaaccaagtgtctctccagactagcatcagccctctgctctctcatgagaagtctagagaccttctctctatagcactctctctaggtgatgtattaaccattcactgatttattttttaaactaccatctaggggacagtgaccagtaggatcctctcaatatcttactatgagctgctcattaaggtgttttaaaaccacctctcttgctttccttgcctcacaagccactctgatttcttcagagacagtgaaacgagtgtatttgaaatcactttttacatcatttgattaaatattacccctgactttcttggaagcttttagttccattttgcctttcatttaaagattttaaaagttaactttaacaatcttaatactataaaaaggaatgaaaaagacataccgtgagagtaatttttgggaactatttctacaaaaatggaaggaagtttacacaaaacaaactttaaccctaccacaaccccagaagtattgcatttatccaacttctcttccagcttttactttcatcattgtaaacttttgcttttctatcccttgaggctttttgtaaactttccattttgcagtatatttgtttttagtgtttgtgtagtatactccatgaaattgatatttcataatttattaccctttcctttagtgctagacattaaggttatttagtgctagacattaatagtccatattaatggaaataaccttatttctctctattataaataatgggagcaagaacatctttatatatagagctttttcctatgtttgaattatatccttaggataaattcccaggagtgggattagtggatcaaagggtatgaacagctttatggctcttaatatttattgctaaattgcctgaagggtcatactaattcacaatgccacctgcaacacaggagaggagctgcccctcccagtcctgccaacgctcatttcttcagtcaatagttttgggcaaatttaataggtagtcaagggtaaccattgctgtttttaattggtgatgtctttaactattattaacattggacattttttcttacgggtgtttctgttctattttgtatggtttacttttcatgtcaaaggattacattttttgacaccatgtgaaatttaaaatacttgataatgaaaatgccaaatgcacacagaacagagagagtaattgatggagccctctacgttacccaggttcagcaaatagcaagatttggccatacttgctttatctactccttcctcttttttcccctcttgtgcagtattttaaagcaaatcccagacattctgcatatgtttcctatacacttcaccgtgcatctctgaacatatggactttttcttacataattataacactatcatcacacctaacaaaattaatgataattccttgctattatttaataccaacctgcaataacattttccaaagtgtcttttcttctgatgctttgttccaatcagcatacactgtgtttacatttagttatgtttctaaagtctcctaatctagagcattgctgccccatctctcccgactacttttattcgtacctaagaactgagtcagttgtcttgtaaaaatgttcacattctggattcgactttttgtgtccgtgttagctctagaagcttgattagatcaagtttcaccttttcggaaaggcaagaacacttcatgggtgatgctgtgtgtttcatcgtgtatcacttctggggtgtataatgcctggttattccaccttgggtgatgccaaggctgataatggagtcaagtggtgacaacccaaaacatgattgaatgttttttcattagcttttaccatcatggtttaatctactgatgatggatgcttgaagccattatttcatagaaattgcaaaattgtgattttctaattctgtcattccttggccattgattaactggaattattctgtcaagtaaaactagggctttttagagtctcaaaatgcagtttgaacagagaaggcaagacagatgctttattttttcctccaaactcctttccaagtaaggagttgatgccttttttacatccattggagtccagtgagctgttactgttttattctaaagacatataatagtcatgttctttaatatctttatatttcatgtgttttactcaattacactcattattatttttgatgttcagaatgttccatccttggcccaaggggagacacctcatgtccttgttttcaggcataacaaggtatctcacgttcatctagtttatttttttgtcccctgaaatgagccattccaccaagatgtcctgtgtttttttagtggggaatgctatttagagaccacaatctgcacatgttatgttcttattgtttccaagttttctcagtagatagtgtagagatacatattttacaaaagaaaataaaaattatgaattcatactgatattgtcattttaaattgaacaaaattttgtttacttctttgatttcacacttgtattgctttctcttacagtaaaaatcttggttccaaacatgatgataccacaatatacatcaaacggtttcaaaataacttcagtgttactgctaacaatcttctcagtgaatgagagattactttgcagctctatttatctttaataatccactaagaatattgagtcaaattactgtattctaataacacttggattaatacttctcaccaatttgatatacatcgtttcttcaattcagtttgttctcagattttagggttcactttttttctttttggcttcattttattttttgaatctgtaaaatatgctttcaaagttaaacctatgtaacaaggcttatgtttattacataaacctatgtaataacttatgttatcctgtctccttcacctaagttcttccctttccctattggtagctatttattaataattagggttcattttgtctttgcagtgtttcttttgcaaatacatgtgcattcatgtgtccccacctgttttacatcaaagcgagtatactgtctaccttgccatacacttcatcagtgtttttgagatctgcattttttggaaggttacacagacctccatcataccatgcatggtttaaccagtcgcttattgatggagttctgttttgtgtttcctaaaataacacatatcctttgttcatatcatttcatattttggccagtgtatctttggtatctattcctaaaaatggaattgctgagtcaaagggttaatgcatatgtactttttctagatactgctatattcgcttccataggaatagtgtcattttgcatgagaaggattttaaaatttgttttgttttcagacagggtctcactttgtcacccaggctagggtgcagtggcatcatcatagctgacttccaccttgacctcctgggctcaagcaatcctcccacctcagcctcccaagtagctgggactacagggacacaccaccacacccagctaattttttgattttttgtagaggcagggtctcactatgttgcccaggctggtcttgaactcctaggctcaagcaatcctcctcccttggcctcccaaagtgctgggatcataggagtgaactactgtgctcggcctgagagtgattttttgaaataattttgtgagcacacaaatttaatatacaggatttttggaaagttaatgtgttattaatgatcctgcatactgttcccactattatgcataacacggcctggtacagagtactctggttcctgccttcagggaagctatggtttgtctagggagacatgatgtatgattggaaaacaaagagtagtctaagatagaatatattataaaaaacaaagatggatctttttaggaagcctttcttgcttactccaggccacatgagtcttcagtcctctgaatttcaacacttttaatgagacttctaatgatccttttttcaaaccaacttttgacacttggttgaacaaatatgaatgtattgaataacacagccaaatgtttgaaatgcaggctgccctgcaaattcaagccgaataatcattttttggagagttgtatctacatttcccaaagcatgttctctggaagatcttctggctgttttaaagggttacacagcaaaatcagtgtggaaatgttggattaatcaaagctgaggagctgtgactccagaatcatgtctgctgccccaagctcacctgttcacacaatccgcctgtcttggagcgtctcgcgttaatactgttccacgaaacacagagaatcagtatgcaggctgtttcaatgaaaaccatccagccccactggaaatgaggaaaaatagaaatagaaataaaaataaatgaaaaccaagggcatctattccagttgataaacctgtacttacacaattgtacatttttgattaacaattttccatccctttctttctagattgaatcattaaagaaaaagttgcaacagaaacagctcttaatactgcagcttttagaaaagatatctttcttagaaggagaggtaaggatctctgtttctttaagttggtgtcttccctaccattaaattttatgttgctaagcctaccaccgacacttaattaaaaatatggctatttcccggccttataaaattgattgagggttaagtgccagccttgaaaatgaggttctgacagctgtttttcctttaccatcggactcccctcattccagttgctgctgacttctgctttttggctctagtttttcttattaaagaatcatcctagcaagcctgataagctgttgattagcactgataattccccgcatttgtccagtgctttataatttgtgagatatgttcatatacattccttacattattctctctgcaactttaagaaaggcaagactaagattattatctctgtattaatacatgagaaaacagaggcacagagaagacaggtggttttgctcaaggttgcccagcttaataaatgtcagagccaggctgaaagactcctaaatccagtgctctcctgtcacagcgagtgaagatgtgttagaggggacttaattttacctgaaactttcagatgcttagtattcttgactttctggctttttgaaagtcatttggggattttgtatatgttccagagaagaatattatggggttggaagaactttacaaggagaagtcaaaatctatttgctctaaaggttctttattagagcttggcattgagcctttgccttttgagacttcctgaaaagctggtttgccaagcacctgtccttatctgtgttcctcgttatagtccttccacagtgagagagcccagcagacaatgataaagtaagaagaaagagaagagaaaactttgattaagccctgctgtgtgttgggcactgttagttactttggatatgttctgtgtaacacagaagttaagagtggaatccaacttacccaagtgtgaaccctggatctgcttcttatcagctgggtgatgtgggggaagtttcttatcattataaaggagggatcataactgtgctatgtgtgggtgacagtgaaatcagaatgtatagaaggtgcctggcatgtactaagcactcaataattttaaacgtattattgttgttccctctttattaaaagggacaccctctgagttagatgatattttcccccttttttagatagggaaactgaggttcgggggtattaagaagtctgcccaaggttacagtagagatgggtaagcctggatccagatcctgagctctgaaccaccatgtttgagtgggtggtgagctgagccttcttttactctgtttttgaggggttgccttacagcagtcataaccagaagtccctcatggcccataggggcctggcaccagattcaacgcccaagagtctctgtcttttgaagctgagtaaatgggtattttccccatttccactcctgtcttccctgccacagtcattggctcagtgccagccttgtgaatgaacatttctgtttctaagattcctttctgaaattgcagctccctgtgggaggaagcacaccttccccagtaagagtcagaaaatgagtgccctagtggaagcccatgtggccaaagagaaggcagtcacaggagagaggaaagacagactgacaggagaggcagaaggtcccccaagacagtgccccccacccccacctctggctgtgctgctaaagcaagctctcctactggtagattcttaaatgtccaagggaatattgcacatggggagtaatcttagaaatagctatgttggtttatgctcagtgtattaaactcatgtctcaccttagtttgggttgctccagcccttgaaatgtggagtccagatagtttatctgggaggcgatctcaggaagccccactaggggaatggggaaaatgagacagggaagggaagagagccaatagcggtgccatatcaaggaggttgccctgaggacagctgaggctcactcctgctggggatctctgggagatggtgtggaagtggccctgagctttccttactgaaaggccagaaagctggggcatttatccactaactcccatcagtcattagctgaggcctgctctggggggttgtggcagttctagcctgccctcggcagagccagttagactctggtggtcaaaggaagcccccagatgaagaatcaccagtggcctgttaggaaacaggaatgcccagaggatgtagcggggtgggtggcagtgtcagctatgtctatctaataagcaagactttgaaaaccagtttttttttgagcatatcaataatgattatcaatttgattgattaaattccctgaaactatttaaattccaatacaaatttattatgactaattgcttttggccacttcacacatccaccttaaatagcagacaatatatacaaaaaaagttgcataataacaagatttaataatacatttagacttaaacctattctaaaatactaaatatcatgggttttaatttattttgtcattgtttctgttcttgttttttttttttttaaaccttcctgaggccattgttttacttctttcaatattttcttagggctaacatcattttgacacctttcagacaggtgcagtcatctttgagatccaaaagagaaaggataccttctctaaattgctaagattagaggatgtgggttacataggttcttggttgggtcacaggaccctcagtggcttcttccaaggtgattcaaacacaggactccttatcactgtctttagcactattaaaaacttatgcattctttatcaatatttcatcatacatagctaggccatgtagagatctcctctcctagggaatcagaggtgacattcaaatacttggttttcctctttggctctcagactagctgatcatttacacacactctgccgacgctgttccttgctaattgtggatgatagctaatgctgacacgttgctgcccaactctccacttgattgctctacggcacggatgctaagcagtccttctccaggtcctgaagtcctggggtgacctaacttacatgttctttagttattctttctaacataacagaaaacttttaaatagatatctaattaatacctcctaaaagaaaccacaaaagttttggtagataaatctggtagctccccatcttactaataagtagctacatttgtgaagagtgcaattgcagactccagactcagactacctgagtacaaatctcagctctgccacttagtagtgatgtgatattgagcaagttaattaactgtcctatgccttagttggcttattggtaaataggaactctctctgtgaagtggcatcctctccatagagttgttatgatgattaaatatgttaatacttaagtgattagaaaagtacctggctcatggtaaatgccatatgtgttactgtttctttaattgcctgcgtcccagggactcttttattgtcattgataaatattttagatttatagctatgtcccataatgaatcactctttctcttttgctcatcctcaaagttggagactatcatcaaactcagctgtgtgataatttaacaaagagaatttcacctttaggtgaacatgagcagggattgtacaagccaggtcctactagcaggccatagggcccagcagtcctttgcctgcagcaacctgaaaggttcatcctgggagggtgaggctggacgtgagtcttataggctggcaatatttcagcttcttttagcagttggccccgatatttgcagaattcataggagtttgggattcatatcaagtcttagagtttaagtgtcataagctgatggtcttgtatgatgtcattactcctattatgtattctggctccatgcccaggcagtatttggggatttattgatcatgcctgtgctcctcttagccacagtgctgttggttttaaagaagcaacccttagtttcagattgaagagccttggctcttacacatgtcctcagttagtccagttcctagctgttccccaagaacactttagctgttctgcttcttgagctacgggttcaggactgcatgacatatccagcactgtgctggagctgcttcatactggttaatgaaagcggaagacatgcatcacttctcaggtctccatttggggatgtcatgttggtcgcttgcaattagctatggaggaggtcttgacaccacagaaattgacatatgtcacaatcagagctttttaacctagggattttattgtcaaaaatttactagtgcaccattagtgttatgtaactctgcagttatacctaagggctttgtgtttttaccctgacacctctgcttacaagcagagtaactctgggcaggtaattctacccctctgagcatcagtttcagcatttgtgaaatagggataatccctcccacttgaaagaaactttttatgattaaataatagatacaaaagacttagaattgtgcttggcacagtgcgaaagatggacaaatgttaattctttcttaattactcaaccttttggagacttcggttctgactcacattctgccattatctgtgcatgaccttgggcaaatcatgccaccaacaacctggactcggttagttcatctttaaaaaagggagaaggcttagatcaactctgagattattaccatttttaatgtttgaaaactttgttgaaatgttgaaatcgtattaggatcctagacagttaagggaacaccctctacctgatcctgggctcggagaaaaggacaggccctttcctaggtcatggctgacactctagaacccttcttcttttcttttaaaacagagaatatggattattttagtccctggattcatcatttgtgcttacctgggtttaaactcattagattttgaactccctcctccctctgccccaaatccaaatgacacagcagactcctaaaagcttgctctagcctggccctgtcagactacattttcatcaaccaatttaaaatcttcctgatcccgctgatgagtgagaacatgcggtgttcaggggacataaacatgggaacgataaacactggggattactagatgcgggaaagagggagggggaaaaggtctgaaaaaccacctactaggtactatgcttattacctgggtgatggcctcagtcataccccacacctcagcatcccacaatatacctttgtcaccaacctgcacatgtgccctctgattctaaaataaatgtgaaaaagaaaatcttcctgataacaaaaatatgcccattcttttttctttttctttttttcaaacaattttttttattagctcaacttctggagaagaagaaatattctccatttccaatatagaaaatgttcttaaaataacattgcaagcatttatcttcataagctttctgaaactctgaacagatttcgttacacttttctctgtcggatatactacacttacagctcaattcaaaagtcagaggaaaggagtcaaatgtcttggttttgtccatcctgcatttaatgtgtgttgtgtagcacctgagcctctcagtgtgtctgttatgcattcttgcgactattattaatttttctgtgtaatgttggagcggcagcaccaggcactcggctccccacatgcattttatggaacacacattcagtgtatgtgctacagcccccgagctgcccacacccctgggcctgaggggaatggtgggggaggtgaccgccaaacattcgtgacataatttccaaaaaatgtccagaagtgctgcacattttctcccttcgtgaaaggcacatgtgcctcccaagccattgggttggtattcgttacacatataaacacaagggggtggtgtttgaaagcaggaaaaccatggaatttgcttctcaatcccagaagcaatcttttttgtagcacagtccaggcagcagtctgaggctattctttgtcgttccactgtagtcatattctgcaagactaagaaggagatagtcttgatttattgtatcaaatcggttaatttaatttttaaagacttttcttaaatctgtcccacgctctctaactctcctcttactgcccatgttcaggctctcatcatcttttattttttaccttatcaacttagttatttattaacttacataaataagtttctgttatttattaacttacataagtaagtgtttctgtttaagcatataatccactgagttttgacagtgtttatacccatgaaataaccactacaatcaagatagagagaatttctatcaccccaccaaagattctgtttcagtttgcaacccagctttccattcatccctaggcaattcttgatcttttttttctgtagatggtgagtcactttttatcacttttggtcactatggatttccatttagtgggaatccactgtatgatttgcatttctagaaatggaatcatatagcatgccctcttctctgtccagcttctttcactcagcataatgatttgaggcgcatctaagttgtatgcattcccttttgttgcagagtggtattccattgtatgaatatatcgcagtttattcattcagctgacaaaatacatttgagttgtttccagctctgggctattgtgaataaagctgcagtgagcattagagtacaactcattatgtgaagatagttttagttcctcttgggtaaattcctggtagtggaatagctgggtcgtaaaaggaggtataagtttaactttttaagagaccgtcagtttttcaaaggggttgtagtattttaattttccagcagtttgagtgtaccagtgtctccatatcctaacccagacctagtattgccaaccttttaaatttagccattcagtgttatagcttttagaatttgtctagtaggttttctggctttgaaagctccaaaataaaaataaaaacaaaagaaaataaattgagccatgctaggggatatagagtgctgtctcatgtggttttaatgtgcatttccttgtcaactggtgatgctgagcatcttttcttcttttcgagaatcttttcatatgctttttgccatttataagtttcatcttttgaagtgtctgttccaatctttagtccgttgttttattgagcttttagttttcttactattgagttggaagagttctttatatattctggattcgagtcctttgtcagatgtatgtgctatgaacattttctcccatcctgtgacttacttttttgttttcttaatgatgtctgttgaagatatatatatatatatatatatttttttttttttgcaatggggtcttgcacagatacccaagctggagtacagtggtgcaatcttggctcaatgcagccttgacatcctgggcttaagttatctcctacctctcagcctcctgagtagctggcactgcaggtgcatgccaccacgctcggctaatttttgtatttttagtagagatggtttcaccacgttgcccgggctggtctcgaactcctgagctcaagtgatcagcccatgtcgggttcccaaagtactgggattataggcatgagccaccatgccaggccctgttgaagagattttttatttttggttttcaattaaccatttatttcttttatgatttttgtcttttgtgtcctgagaaatatttgcctactacaaggtcacaaatatgttctcctgtgatttcccctaagaattttatggtttttacttgtttatttagttgatccattttaagttgatttttgggttttgtgtgaagcaaaggtatcaatactctttttttctacacagatgcccagttgtttacttttaatgtctctttaatttctgatattatttgtaccctctttctctccctatcttatccactctgtgtctctgtctctctttctctttctcttctttaaccagatagtgggttatcaatttttgttgattttaaaaaataattaaaatagcttttggctttggtgattttctccattgcttgtctgctttctattttattgacttttgccctgatgttcattacttccttccttctaattatttcgggattactttgctcttctttttctagcttcttgaggtagaacttaggtcattgattttagacctttcttcttttttaatataaacctttaaagctataaatgtccttctaatctctgcttcacctgcatctcacaagctttgatatactttacttttattatcttccagttcaaaatatttcctaatttcccttgagatttttctttgatttatggattatttagaggcaggttatttaatttccaaatagttgaaatttttgttgatatttttatttctaatttaatacttttatagtcagagaacacagcttgtatggttttaacttttaatttattgggacttattttatggctcagcatatagtttcaattaaatttttgtgaaaaaatatatattttgctgttgtgtatatcctacaaataccagttgggtttaggtggttgataatattgtttagataactgacatttttcttggattttgtgtaattgtcctatcaattgccgagagaaaggtgttataatcccttaccatggttttagactgtctctttctttgtttttactttgtgtattttgaaactctgttactaggtatatacacatttttgttatgtcttgatgatgaattgatctttacaatatgaaatgttggtccctacctttgtcaatactctttgtcttgatatctattttaactgatatgaatgtagccatttttaccctgttatatttactgtttacgtgctatatattattccagccacttactttcaactgatttatatctctgtatttaaagtacatctcttatagaaaatagttgggacttgcttttttatacatagttatagtctctgccatttaattggagtatgtagtttactaatatttaattatatttatatgattggatttagagctaccatttcattatttgttttctgtttgttccttctggtttgttttgcttattttgcttgcttgtttgttttgttctcctttttgccttttggattatttcaattttttaaaaataccattttaagttatccattggcatttttgctgtgtctcttttctctaatatgttggtggttactctaggtattgtagtatacatcattagctgttcactgtgcacctagagataatattgtaccatttcttttaaaatgtagaagtcttgccatgatatacgttcatttaccgctgtgcctgtggttataattttatatgtattgtatctatatacattataaaaccatgatacatgattatcatttttgctttaacaatcatatgtactttaaagaaattaagagaaactagattctttcatatatactctatttctgaaggtctgagtttctctctgatgtcatctcgcctcagcctgaagaaattttatttagaattttgtgtagtgcaggccaggtggtaaaacattctcttagtttttcttatctgaaagtaaggtttttatttcgccttcattattgaaagatatagagctctaagttgccggtttatttctcttggtactcattgtttctgggttccatggtttttaatgaaatatctgtagtgattcaaatgattatgctcctgtatataacaggttgctttcaagatttttcttcatttgtggttttcagaagtttgactgtaatgtgtttctctttgaatttatcctgtttggggtttactgagcttcttgaatttgtaaatttatgtctttaactaaatttggggagttttcagctattatgttttacagtaattttctgctttagttttcctctcctctcttcctttgactaaaaaacccgtatgttaggcttttcaaattgcttcacagttccacagtgctccatttattgttttcagtcttttgtttatctactttcaattggataatttatattaatgtattgtaaaatttactgactttttcctttaccatcttcagtcttaagtccatctagtgacttttaaaaaaaaattcaggtattgtactttcctgttctaaaattttcatttagttcttttttgtattttctattttttttactacttcattaattgtaagcatatttttctttgtctgactgatcattgttatgatggctgcattaaagtctttgtctgaaaattccaacatcatagttacatcaggattggtgtctgttgattctcttttcccttaggagtgggtactattttcccgactctttatatgtcacataattttggattataagctggacattgtgagtgctttgttgggttcttgttttaaaaggcaatgaatttagccagacccaactacatcctgcctgtctgtgatgctgatggcagatctcagttcagttctttaaacattagctgcaaacttctttcagttttctccagacatgcatggttcagtggtctaccagagacttgaactgagtctgtatacaagaatttagtgttttcccccaactctgactctcctcttttgccttctcccctactgttagtagccctggcatccttctccgggtttcttcccccagaaagatgatctttctgttaatattttactttatctctactgccaccaccatgactgtgctgctctcagggcaaatctgccagcaaaaagaaaaataataaaacacggagaatatagagaactgcttgccacatgcttcaagtttcacctcatctccaaaacttgcctgtctttgttcacttctctagagatctcattagttgtttctaatctgttattcagaatgtacagctgtgagttgcagcaggatcagtgtgttgagtgcatactcctctcactgcaagtgcagcccccactctttagctgaataattgcagtggtcttcctgctgtctttagtcttattttcctccaatccagctttcacttgggagccaggtgattaaaataaattctggtgctgaccttgctattgtaagattgatttctaacttcttgtagtggcatacatagcctttcattaataacttctacacacctgtgtaatgcaataaggtgccttttctcaacccagtgtgtttccacagttctggaatactcatcacctttgatttttcttactctctttcccttgcctaactccagaaactccaccgctgtccccattttgagtcagatgtcccctctgagttccctcttaatattctgtggatccccctataatgttacttagcacatcgttctattatttgctgctcagttatctgtattcccccaagaccgagctcctcaagggttgcaaatcatgccatatttctttaacttctaactcttccctcacctaatttcactgcctgatatatagtagatatacaataatttttctactgattgcattatattctcatgagtatacattttttatttctgtttctatgggtgtctgttgtgcacacacagagttcccatgaaatagaacaaaggatttggggtcatttgtcctccattcactgtgtatcagttgcggcatatttgctaaccttgtcttttaggccccctacctataggtattagacccagcatgctgtgaaatccttatgattaaagtctttacactaagaagggataaggcgatggtattactggagtatccagcaaaggcaggcgtcttctgcctttctctttttttataaattggagagttcagacattgctggggaagctcactgtctctttctctctctctctctgtctgcacgtgtgcgcatgcgtgcatgcgtgtgtgtgtgtgtgtgtgtgtgtgtgtgtgtgtgtgtgtgtgtgtgtgtgtgtgaatgctgatgactctccgggaataagccagcactggggatgaggtgatagattcagaacccatcgatctgtcatagcatgtcatctactaaggaatctggaaagcattctcttcctttacaccatttcttatttatcagaaaggattcattgacttttacattgtacggaacatggattttcacaagaactgatacgttgctccttggtatcaacctttcagagcgggagctactgaatgtttaacccacatcctttctttcaaaacaaatgagcttctgtctccatagaacttttaaactttcttgtgttacctagtgtcttagaatagtgcctcagcttcagctccaacttaaagaagaaaagaacaaatggtttcatttctagttatgcaaataaactgctcattgtaaaatcatttataaatttatttatttagcaaatatttatcttgtatctgctgcatgccatgctttgagcatacaaccaggaagatagatatgatcactgcttcatgaacatttagtctagcgttactgaaaaatatatagaagcactttttaaaaagcatcccagaatctcaatacgcagacataaccactgttcacttctttctgaatattttttttttggcatttttgcccttcggatttcaggcaccagcacttcgtctattttcatttcagtatcttcaacttctttgtctattttcattttggtatctcttgcttctttgtccttcatttcccccatgaggcaaatctccaattgctgagcatctaatctttaacttatgtaatgtttggctctggcccgaaagaaaaaaaacttttcagaatgtgaattttaatcccaaggagcttgttctactttatatgtgtgagattctgaattttccacacctacgaaagactaattaagttatagaggtatttcccactgttaaattaaattaacagacttgctcattttatagtttaatgaggaggtgttaaaagttgggctgtaccttatttataatggcaaaaacgtgataaatatctaaatgcccatcaataagagactagttaaataaataatgtatccatagaatggaatactattaatgagttaaaatagtttgttgacataaaaagaaaactaatatagatggaaagatagctacaacaaattagtggctgaaaaagcagattataacatagattacaatattttgttttcatttatgtaaaattggatgcacatgtctgtacatgcatagcaagccatttgtatgcattcagtcaatctatttcttcaacaactattgtgtaagtgatgctctgtaaatacattgtgatagttgcccatgtcatggggcaaaatcagataatacatataaattgtatcatgcatatttgagggggaacatatttgacttactgaaagtacctttttttctcatctccagaataatgaactacaaagcaggttggactatttaacagaaacccaggccaagactgaagtggaaaccagagagataggagtgggctgtgatcttctacccaggtatttaggaatttcctgatttttttttttattcaaattcctctttggctgaagaaaatactttactaggctgttcttagcagaattgcattcttcctatcacaaatatttctgcaaagccgagtggtggctgctgagaggcttgactggtttctgtaggaacaggggcattgtgcagggtggaggggtcagcaaaggagagacctggggaagccatttagagagagatgggccctgtcagtgagtgaatgcatttgttccttccttccttccttcattcattcaactaatgctcttagtaccttccctgtgccagacagttatgacacagagaggagtgagatttggttcctgccccagagtacagtctggagggagagacaggtatgtaggtagacatatataacggtgtgagaggggcatccgaggtgctttagtgatatacaagagggaggatctaaaccttgaacaaaagtcatctgttcctcagtactgtaacagggtattgtcaagcactggatccagttcataaatacctgatctgcttgagtcatcggcagatatgtgataactataacctggtttgttcagttacattcctgagctagaggactgacctgttcattgttaagctgcttccatgcttgcgtctcttcctggtgacattagagcctgtaacacagtaacctgcctctgataactaactcaccattcccgggtgctcacaactgtgcctggcctcaagaggacataaaacaagtttacagcaaagatgctaatgacatgtgacttgtgatttaggtaatcaaagtcacaaaatgcctggtatcgtgtgtgcaggagggtggattcttgtgtgaacaggggcacttgtgtgtgctttgctggacatagtagtctagaaaaatgtcgaatcctggaatcttgagtggttacagctggtgggaagtagtgacgagccgatcaccaagctggggtgtggaatacctggttcttgtcctaccagccagcagcaggatgccttcagacaggttcttcactggggcctcggtttctcaacttctaaagtcagtgatttgactaggtaactgctcaggcctctaccagctctaacattgtacagtaaggcctcctttccttactttattaatttttatttattactggtattgtcatttttgttaattaaaatgaatcacttgccattctcaaagaatttaccaaaagcggcattaggttctttctttgacagtgtcctcaattacattgcttgccttctagtaaaaaggcattttttatcagtccaatataattaatagaaaatgttgaatatatatatatgtatatatatgtgtatatatatatatgtatatatatatatatatatatacatatatatacatatatatagactccggatctcatcatattcagatatattttcatatatgaaaatataaccaaaaagaacgatcaattgtgtacagagacctttttgaaatttaaataatttggccgtttcccccctttttgtatttttcaaaagccaagtggcctagtccactctaattgcccacataataaatcttgtttggctaagacgggtacaaaactatgtctgaaaccaataaattgtttgttttctaattcccgcattttggcttaaaacaagcttttcaatttgtatgcccaagtatagcctgaagcaaacttttatggctaagttatgaaaccacaaagcggttttcataatggaagtgctgacagacccttaacttatggccatggtgaacttggaagccacttcagtatctaaaagcagcttttccataaatgtaacatttggtttccccccggatccatcttagcagtttaactacctaggtcaatcagcagaggaaatgaaaactacatatccgtgtttccgaaaaggcagaataatatttcattcgtttcctcgcaaatatttattaagtgcctactatgtgaaaggcgccagggaagtctgggtggggaggagcccagaatctttcggtaactcagggcagtggccttccacctgcgcttcttggaactgccttactctgagctggggctcctggagaggcttcgggatgcccggggggatgaggagggttagtgagcggctggaccgtgggacccttcttcctccccaaaacaactgagaaagtcagcttttagtttgttttgtctgttggattccaagtaagattctgtttgaataaatagctctatgggcaaaaacaaattggaactcccggtctagttaatccccatgttttatggatgccagaactggggctcagagagatcaagtgattcactggaagccacatagccagaattagaaccaggccttcttgagtcttggtgcagtacatgtgtagtttgaaaatatgtaataaatagagagctactaaatggtggtgtgtatgttctaacaaaattcctggttcatacttggacttcaaatttgcatctaactaataaaagattccatggtattgtccagaatgttttttagatttttgtttctagaatgttttagaccaatacaagcattgaattaagcctgagttatgcagaagcgttttgttctttgtccctattcttctcctacaaggaattcaccagtgtggaacagtcagggaggctcaggctgtccagttccctgcccagccagctgctagctgagctcagccttgggcaagttacttcatctctctaaagcttcaactctttcatctttaaactaagaatgaagaggataatatcaaacctcattgggttgctttgaagattaaataaaaatgtgtacataaagcatttagagactgggcatggtgggtcacacctgtattgccagcactttgggaggccaaggcgggaggatcccttgaagctaggagttcaagaccagcctaagccacatagcaggaccttatctctaccaaaaaaaaaaaaaaaaaaaaagaaaagaaataaaaaataggccaggcatggtggctcatacctgtaatcctagcactttgggaggccaaggcagtggattgcctgagctccagagttcaagatcagcctgggcaacttgatgaaaccctgtctctactaaaatacaaaaaattagccgggtgtggtggtgtgcacctgtaatcccagctactcaggaggctgagacaggagaatagcttgaacccgggaggcagaggttgcagtgagccaagatcatgcccctgcactccagcctgggcctgggcaacagaatgagaccccgtctcaaataaataaaaataaaaatgaaagcattttagcatggtaactggaccagagttaagcacttaataactaatagctattactattaatattaactaaacccaaactctgattttctatgtagaacactatataaaatacaaaaaaatctgagtatgctaagatgatttcattaactttttattggtggtaatcattgattttatgaaatggattgatagcctgatcaagtatatagtacttcagtatgcattgggctcttcagttaaactctctagacaccccgtctagacactgtgtaaaactctgggaggcccagtgattgataaggtctctgtcagctaagacctgagagtggcccctgcgtgctgtaggcatggggcacttgtcttattgtagaatagcatggcctctcctactcactcatctgtacaactgcaagtgttacatgctgtgctactgctaatagcatttttagagctgctctacttttttttttgtcttgtgtgaaaaaaaaattgcatttagttgccgggtgtggtgtctcacacctgtaatcccagtactttgggaggccgaggcgggcggatcacctgaggttgggagtttgagaccagcctgaccaacatggagaaaccccgtctctactaaaaataagaaattagccaggtgtggtgacacatgcctgtaatcccagctactcaggaagctgaggcaggagaatcacttgaacccaagaggtggaggttgtgttgagctgagatcgcaccattgtactccatcctgggcaacaagagtgaaactccgtctcaaaaaaaaatgcatttagttgatgctcaataaacatttgttgggtgaataagtgaaagatacataccaaatgaagaacataggcaggtgatcagtattatcacatgatttatttatttaataaaggccttggatgaagtcattcctgcttatgtttcacctctttgtgtgtgtgtgtgtgtgtgtgtgtgtgtgtgtgtttctctctctctctctctctgtctcctcactagaatatgagctccatgagggcagggattttcatctctttcactaattgcattctccctgggacctccttagagcaatgcttggcacatactaggcactcaatatttgttgaatggagccatctccctgtagcatttgacaatccttcctaagaagaaaggaaggattcctcagcctatttcctacccttgcaggacttttctctcctggttctccacctatctccctggtctgtccttctccagcttctctgatggcttcttttcctcctccaagaccctcccatggtagtccacatggctctatcttggttccggtactttctgcaaagattacatcaagtctcacagcttcacctctcccctctgtggctgagccacagaagtgtgaacctttctcttgaatacaagtccttgttccccacagccttctgggcacactcccagctggtgtctgcttggtcttcatacttgccgtttcatggccgagtgcgccatctctttcttcaaagtctctcctcttaggagtgagtaagaatactggcttggaagttagacctgggtttgggtcctgagtccgcctcctgctttatctgcagctttggcaaattcctaccctccttgattctcatcttgaaaaggatgattttggtggcaatccctttggaagcttgttgagaggattaagggaagtaacaggcatagaatgtccagtggaagtgccccgccttttcatatttctgtggctgcagccactgctttcccagctacctaaactcagtatattgcagtcacttctgagtcagagaattattttgctccttgactcactcactcatactgtgctgttcttttccttcatgacttgactccttctttcccattcctcttgctgccagcctgcctcagactgtctaatctactcagtaccatctctctgcctcactttctcctcctcaaattcttcccctccttcatctaatctttgttttccataaatttctagtgaccaaggatctcttcataaagagagagggaaagggaaggggtgagaggggactcactgtgggttcaggagttcacacacacacacacacacacacacacacacaaatgtatgtgtgtatttaaagactcaggagtttagtttgaaaactttgatatatgttaattaaagccattgagaacaagtgcaggtcatctagccttcatttacaaagaaaaatgaaaaaacaaaaacgaaaggaaaagtgacttttctttcttctgccctgtagtgaaacttggtttccagcaaaccagcaaacttggttttcatcaattatgtcttaataggtgcaatatgatgaaaaatattccccatggtcataagtgctcagcacgtagtaagtgctttaaaatgcttatattttcgtatttcttttgcaaagaccagaacacaaagtagctttttgtcaaagctttatttgctgattctgctattgttttccccaggggaactgcccctttattgattaataaaaggttaacaatagcctaaatgtgttaaggcaaatggttgggtttcagttttgtggttgaggttatttgtgttcttgaaatcctgttgtttcctagtgatcaacaaaataaaataccccacttcttttttaaaagatcgggatatgagagcctgtttttgaacctagaaggttcacctttataaatatttctgcattttatgggctttcaggatattgtcattggagactgtttctgttatgcagaattttcacaggagttggcacaaatagccatctggcttctgcccctggcattccactaaactgcctggtcaggtcagtggggcctcctggatcaccaggtcccatggattgctctctgtggcaggtgacactgggaccacttacttcttgaaactcctccaacctttggtttcctttgtaattcatatgtggggtaatagctctgtggctggcttctgtgagctgctggattcatggagatgacggagatgtggctttcacccttaaagaaattatacctagcagtggacacaaatgtgtagaccaacaagtgcaataagatgctatagaggcttggcgtggtggctcacgcctgtaatcccagcactttgggaggccgagttgggcggatcatttgaggccaggggttcaagaccagactggcccacccagtgaaactccgtctctactaaaaatacaaaaattaaccaggtggtcatggcacgcgcctgtaatcccagctacttgggaggctgaggcaggagaattgcttgagcctgggaggcagaggttgcattgagctgagatcgtgccactgcactccagcctgggcaagagagagagatttggtctcaaaaaaaaaaagctatggaggtgtcagaagcctgtataatagtgatgttcaaggtgtatatggggattgggtggagaatatggagaatctcctgggggagacatgcaaagtttaaaatacaccccctgccatgctttttaatacatcctctatcacctggtgaatgactggatgtgggaagttaggggaaagggattcgactcttaggcttcatatacacattttgtcatcgtgttggttgggataaggaatgtagctatttgaaagaacccacagatcttggtggcttagcatggtaaagattaatttcccatgtcagtttaaggccgtttggtataggtttcactccacacagtctttcaggaacccaggaattcctccatctagcaaccctgcctgagctttggagtcctcctggattctccacttgtatgctctacataaaagggaagagagagagagagcgtgggggattatgtagatttttatgggttaaacctggaagtagtagaagtcatttctgcctgtttagtcacatggcccacctaatggcaagagaagctgggaaatgtagttgagttgtgtgtccaggagaaaaaagaaatgggatgtcttagtcacctaatcctgttaactataactctcaaatgtctccctaaaatctccccgccacttcccatcaagtgcttccgtcagaattcaagttgtcatgatctctctttcacctcctgaagagcaagaattttctaactgacctgccttcagaataatccttccctagtcaaccctcgatagtaccagaggaatcttgctagaataaaaatatgagcagatcatggccctccttaaaaacctgctgtagttccctgtccccttctgaactccttagccagggacatgggacccttctccaccaggcctcatcttctgccactctccattgtgaactctttgttccagtcgttccaaaggagcacatggtttgcagttccacatccacaaactgtgtgctcacccatctctgccttacacatactgccccttcttcctggagttcccatccccgctttgcccgcttgatgagtgctaggcatccttcaagattcaccttctctgtgtgaatttctagatgtgaatttcctggtggtgctaaattgttctgccctcaattttcccatcatgtgttcatgctcattttgttcaggtcatggcgggaagggaggcttgagagttaaatgaagggactgttgtggatgtttgggcaactttaagggaaataaacaagggacagtggcaggctgtggaactagcaacagtggaagctgttaccacccttgcctgaggaggcaggggagaaagctggggaagataacaagttggggagctgtagctatgggccctggtagagggatgccgccaactaccaagctgcagcctggctgggaaaggaaaaatgtcccgacctctttgtcctctcattccctgatcccctgctaccaccttgcagtaggccaaaaggaactgaatttgaagggcaaatggatgctgacttttccgggccacagagtagggtggagaaggggcagagtagggctgaatggcaaaagaagaatgcccagcacagctgttatgtctctgttatagttcctaacacagtacatgaaaattttttatgtacatatctttcccaccaggtgacaagtcccttgaatgcatgtttcatatttttctgaaccatggatgcctagtacaacctttacaggttgttaaaaataacttttttatttttaacctgtcgtagtctgttctggctgccataacaaagtaccataaactagttagcttataaacaacagaaatttttttctcacagttctgaaggctgggatgtctaagaccaaggtgccagcagatccagtgtttggcaaggacttgctttctggttcatgtatagtgtcttcttgctatgtcctcacatagcagaagggatgatgatgaatatttctggggcctctctttttttttttgagatggaatttagctcttgttgcccaggctggagtgcagtggcatgaacttggcttactgcaacctctgcctcccgggttcaagcagttcttctgcctcagcctcctgagtagctgggattacaggcatgtgccatcatgcccagctaattttgtatttttagtagagacagagtttctccatgttggtcaggctggtcacgaactcccgacttcaggtgatccccctgcctcggccttccaaagtgctgggattacaggcgtgagccaccacgctgggcctggggcctctctcataaggccactaatcccattcatgagggctccaccctcatgacctaatcacctcccaaagtccccacctcctaatacatcaccttaggggttaggatttcaaaatatgaatttgggaaaacgtaaagtccattgcagggcctgtttgtaatatttaagtgaaatattaagctgcattattgtctttttatttttaaacacttaaacaccattttctagagttgtcttaccatgtgaagcatatggggggttttgttttgtttcattttcctgacctgcattttctcatttctcagccaaacaggcaggactcgtgaaattgtgatgccttctaggaactacaccccatacacaagagtcctggagttaaccatgaagaaaactctgacttaggcactcagaggcatacactttttacagatggacaaaagctctggaaccctgtggcttcaaatcctttgggaagggtgactgttgtttcccctacacacagtgtaagccggaatgggaatcgctgaggctctgatccacttctaagacaggaaggaaagtgaaggcagagtgagcaggtaagagagggatatacaaggtcacatttcagacacccactcggcataccctgccgtactgcatcatcatttgttttctttgtagacactgaaatcctatcaggaggattccttcacaatgtattttatttgctagactttggttgggagggaaaaggacattaatttgaagtttcatgttattcatgccaggattgtttgatagagcatgaaggttttgtttacccataaaagtattagaggcagcgtttctctgatacagagaggcctgtccacaagaagcatgggcacccagccaaacttgaacctggaagggagggttcccggcctgcaggtgctctttcctcttggtcccaagcatctgtgcagggtcgtgggagccacactgagagacttgtgtgggccagacaagcttcattctgatgcgctagtcccttggtttaatttgtgccttatgctttcattggaccagctgaaatcactgtatttattcaactagtgatttttttttctttctcactttaacttaaagagaattttatatgtcttggaaatttaataatttagtgttctcagtatcaattggtgtttttgttaaacgaatgaatcatctgttcatgcatgctctactttgatattataacctatgtcacatgtgtttaataaataccatatattttgttctactaatgttgtctctctgtttcatccatgaccatgtagaaggggcagagagcagatcaggctctggaatgagtgtcaaagtcaaatcacatgatcttccagccagtacaattcatacaagcatctgtaaaccataagattgactgtgtgtgtcgggggagggtggggggcctatctgtctttttaattgctgaactttagttaatacaccatgtggaaaaagcaagataccttaatgatcacaaagtacaaaaatagattttacttttaaacctttcctcaaacctcccaccccttactgtctccacttccaaaaaaccaaagaaataaaaaagtaagaaagcaaagcaactcagttagataaatcactgtgagtcagaatcatgctaagaggaaaatgtgcatttgggagccacatttgtatttaaacactgtccgtgggaccttgggcgagtcgtcaaggctctctgaatattagtttcatcctttaaaaacctcggattatcacacctacttgataggctgacgtgagtgccacatgaggtcattcccacatagggagtgggcactgctaggcacacaggcagtgattgctgtcattctggaggttttagagcactgctgattgctcgttgagtctcaccactggaggtattctagcagcaaaaaaccgtgttctgtggcagccaccaagaaggagcacttagagaaaaagctgtccttaggaccaggagatagggaagctggactcagagagaggcagagggttctgggagcccatccccctgaagaaactggtctggaagcagtttctaagtgaaatgcaatgacttaaaaaatgtcaattttaatgagaccaaggtagaaatgaaaactactctgccaatacttccacattcacttctttctctctctcttaaaacaagcaaggaaaagaaaaacttagtaattttaaatttaaaggataccagggaccattctgcagctcgggcctttgtattttaaaatatatcttcaacatatggaaaattctaaacatgatttgaactactcaagaagactattaaagagagttcctaaattgtacagactgaaaccgaaagaagctgagagataatccttccagatcctttgtcaacattgactctagtgccccccaaccctccatctaaaggactgacattcatcaacctcttcatgagcaggggtattacataaaattgggagaatgaactctaacatttcatagtaaatttatctcactgaaatggaaagcagcagtgtatgtaaagggtttttaaaaaataaaacaacatcctataatcttccaattaatatcttcattccagaccttccagaattttaaaacacacccgctccattttgtttttaaaataaatataaccctatactgagaagtggaatcatgtgatttttaagaacgtgggaacactcgagtcagctatctgagcttagtcactagtgcgcatgtgggtaagtcacaaccctgtctgagggcctgtaaaattggaactgtgagagttctttcctaatggggttggtgtgaagagtaaatgagttaatgcctgcatggttcttagaatagtgcttggcacatgataagcacttaatatatgctacctattaacattacatacttttgtagccactttttgcttactttatatatatataaatatatatatacacacactttatatagtttgctttatatatatactttatatatagtaagtttgcttactttatatatatacatataatatatatttttgcttattttatatgtatatatactttatatatgcatataatatatatgtatacaatatacataatatatattatacacatatatgtatacaatatacacatatattatacacatatatgtatacaatatacacatatatattatataatatatgtgtacaatatacacatatatattatatataatatatgtgtacaatatacacatatatattatatataatatatgtgtacaatatacacatatatattatatataatatgtgtgtacaatatacacatatatataatatgtgtgtacaatatacacatatatataatatgtgtgtacaatatacacatatatatgtgtgtacaatatacacatatatatgtgtgtacaatatacacatatatatgtgtgtacaatatacacatatatatgtgtgtacaatatacacatatatataatatgtgtgtacaatatacacatatatataatatgtgtgtacaatatacacatatataatatgtgtgtacaatatacacatatatataatatgtgtgtacaatatacacatatatataatatgtgtgtacaatatacacatatatataatatgtgtgtacaatatacacatatataatatgtgtgtacaatatacacatatataatatgtgtgtacaatatacacatatatataatatgtgtgtacaatatacacatatataatatgtgtgtacaatatacacatatataatatgtgtgtacaatatacacatatataatatgtgtgtacaatatacacatatataatatgtgtgtacaatatacacatatataatgtgtgtacaatatacacatatataaatgtgtgtacaatatacacatatataaatgtgtgtacaatatacacatatataatatgtgtgtacaatatacacatatatatgtgtgtacaatatacacatatatatgtgtgtacaatatacacatatatatgtgtgtacaatatacacatatatatgtgtgtacaatatacacatatatatgtgtgtacaatatacacatatatatgtgtgtacaatatacacatatatatgtgtgtacaatatacacatatattatgtgtgtacaatatacacatatattatgtgtgtacaatatacacatatataatatgtgtgtacaatatacacatatatataatatgtgtgtacaatatacacatatatataatatgtgtgtacaatatacacatataatataaaatatatgtgtgtacaatatacacatatatattatataaaatatatatgtgtacaatgtacacctatatactctatatgtgtacaatgtacacctatatactctatatgtgtacaatgtacacctatatactctatatgtgtacaatgtacacctatatatactctatatgtgtacaatgtgcacatatatactctatatgtgtacaatgtgcacatatatactctatatgtgtacaatgtgcacatatatactctatatgtgtacaatgtgcacatatatactctatagagtatatatatatactctatgtatattctatagaatatatatgtgtacaatgtacatatatattctatagaatatatgtgtagaatatacacatacattctatagaatatatgtgttcaatgtacacctacagaatatatgtgttcaatgtacacctacagaatatatgtgttcaatgtacacatacagaatatatgtgttcaatgtacacatacagaatatatgtgtacaatgtacacatacagaatatatgtgtacaatgtacacatacagaatatatgtgtacaatgtacacatatataatatatatgtgcacaatatacacatatataatatatgtgtacaatatacacatatatatgtataatatacacatatattatatataatatgtgtatattatacatatatgtgtatagtatacacatatatattatataatatgtgtatagtatacacatatatgtataatatacacatatatatgtataatatacacatatatatgtataatatacacatatgtattatatataatatgtgtatattatatacatgtatgttatatataatatgtgtatataattgtatataatggatataatatatactatatgtatataatataccaatagtgtatataatatatacgtatatatattatatatagtatataatatatacgtatatatattatatgcgtatatattatatacacctgtgtaatatatgcatatgttatatacgcatatgtaatatatgcatatattatatacgcgtatgtaatatatacatatatatacgtgtatataatatatcatattatatattgtatacgtacataatatatcatatataatatacgtatatatcatatataatatacatatatatatcatacattatataatatacgtatataatatatcatatattatataatataagtatatcgtatatcatatatcatatattatatatgtatataatatatcatacatgtatatattatatacgtatattatatatcatacatgtatatattatatacgtatatatcatatataatatatgatatatacgtatataatatatacatgtatgatatatgatatacgtatatcatatattatatattatatacgtatatcatatataatatatactatatcatatatatgatatagtatatattatataatatattatatataatatattcacatgcatatatatgtgtatatatataaagtatatatacatataaagtaagcaaaaagtatacatatgtattatatatagaaatatatacatatacataaagtaagcaaaaagtgtatatatactatatatataatctacaccattgcttcttataggtaattggattccattttttgatgtcccataatttatttgacccatcccttagtgttggaatcttggatgttgtcttcacttttcttcagcagtcctctgatgaaccatcttgtccacacgtttttgcacacttgactgattattttctcaggatcagttcctagaggaattgtctggtcaaaaggtgtgcacacttttggtgcctatggtccaatacggcctatggaaatttgaattcattgaaattctcactaacaggctgagaatgtgacttcctgactcttttgccaacatgaggaatgagaaacagagtgtacaacatggctttctttaggcagacctgccccccaaacaggtggtgaacaaagttccttcagcatattgcctgtggatatcagaactcagggacatgcaggtgtgagctgcgggcctggaggtgtccctagggcccagagagtgcctgggcagccgacgggaaactggatggactcagaaggagcaagtgtccctcaggatccaggaatcaaagaaggcctgccgcttagtgagccagcatcaagagcctgtcactcaggccacatgcctaagatgcggtttgactctgagtggggcatgccccctatttcagggatagcctgggagagaggatcaacatttgggaagtgcttggagggtgcaccaaccaaggctgacccctgagctggtccatgtgtccactgtgagcacccactttcttcccagtgaatgccatctgcctactccaggaactctagggtggtcaccagggcaaggagtgggggtgataggaatgggtcctggctcaagtcccactgggccatggtgctcttcttgacggccagactgagagggccagttcagttcacccagcacatgccaggtgcttggaagacaaagaaatgcacctcgagacccttgctgtctccaaaatcttttccagcaagtccaggccctcctgatctttcccatctctgaatcccaggggaacttattttcagccccttctttattcttacatctcatgaccaatctttgtgtacatttattatctctccagtgacataaactcctcaggggcagtgtcccataaggggcacactagtcatttggagggaagccattgtaaaccttgataagcatgaagaaatctacaaatgaggagtattccagaaaaagcctcggctttggggaagtaaataataccaggagttactgagctggacacagcacacatacactgagtctttacaacagtcctgcctggaagatgttatcaccaccatttcatggataaggaaattgaaactcaaaaagatgtgaaaattgtctgaaaccactcagacctgtctgatttcagaacacaggtgggaggcctggagtcagtcccaggtctgccattaaatcacaatacctccttggtcaggtcactacagcactctgcagctccgtgccccaggatgcagctttttcgatgaagtaaatggaattgcatcccccacccaggcttgctgcacagatcatggcatagcattgacaaatttcctagcagttcatcagagatatgccaataattgatacctgctactattactagtaattaccgggaagccagtattgcaccaagaatatttgcaaacccaaggatttcttcttattggacacagagattgaatgaatgctagcgaatggaattgtgcagaagacaaacaggagtgagggaaatgctactggataagcaggaggttaaataaactgtatctccttttgtttagatgtgaatttaagaataatctattttactttgtcagggaaggaaaggcctaaaagggagactaaagatgagttgctaaaaaagagagaacagaagcaaagagaccagaaggtgagtgctgctaaagcttggggtaattcgttaggcaggattagataactaatacatggtgtgaaaaatatcgttgcattttgtttttgcatgcaaatatctaattgttttagcactatttgttgaaaagactacccattttccactgaattgcccttgtaccattgttgaaaataaattggccatatatgcataaatctatttctatactctctatactgttatattgggatctagttgcttatcttgacactaatactatgctgtcttgtttgctgtagctttatcatcggccatgaagtcaggtagcacaggctctctaattatatttttctaagttgattgggctattctaggtcctttgcatttctatatgaattttacagtctgtcaatttccacaaaagcgctattgggattttccttgggactgcattgaatagacaggtcaccaaggataacatcaagaccttgctgtgtcaggccagctcctagcaacactgcagcccaagttgggagcactaggttggctcctggatgtcagtgactgctcttctcttccttagctggaaaggtactgggaaaaacctccatagtgtattttggtaaaggtatagtataatctttgtgggattccgaacaaaatattataagaaacattcatttgtgcccaagggccataaacttggtgtaatctgaatgcaataaattataaataaatggcaaacagttcttgatggttttctcttaatttttcaagttttaacatagagcgtttacaggattcaccttcctgatttagggatgggaggggggttgagaaataattagtaggcaattttttggccctgggacttttcttgtaaatgttttctttggcagccatactcttgagaacaggaagttactctcttgttacagatttaagacttttctgagccaaataacagaaagctggattagttctgaaatgaagtggggggaaaaaaaacaactctaggctcttgctggagattaatgacatcttacaaatattttaattctcccctttcctcttaacttgctacctcctaaacaaaacacactcagactgaaaaaaaaaaaaaaacaaaaaacttaactgatcactttgtagcccaaccttaaaataaaatatctttatggtgcccacaaatttatgtaaacatttttggggtgttaaagggaaggaaaatagggctgtcttaagtcgatcctttttttgttacaaaatccccaatatgaaatttagagcataaaatgtagttgtaaagatgctaatttttctatgataatcacacagattcataattttctttgatctttttaaaatggcttttaaaaatagataaaagtgtttaatcaagctttgaaaactatgcctatatgttgtttgagatggttgcaaacaattctttagaaattgttccaaatgacaggattatatcctttgactagagcatctctgactataaaacaaaggaattatttcctccaaaaagactgagtcctcacagaagggcatgctgaggtagaaataaaaaaaaattaaatttttacacttgattctaaaaaaaagttgtaatcttaatgaagttcataatctggaggaacattaattccgtgaattatctgagaactatttgtgaggattgtttttaaaattgctttaaatgtaaaagtttttattttttgcaaggattcttaaaacacagaaggccttataaaaactttgagattgagaagtaaagaacgctttcctgtaacaagtatatatcttctactagtaatctaggaagtttctatggtattaattgcagcctcagaaaataaaagagttggtctaagtgttttatttgcacttgcctcctgcacccaaattcaaatgccctggtacccaagaagtttgcctatagttgagaagggtaggataatagggccagtagctgatgggagcaggggaggatgcttccctgggctataagaacatgcctatcctaaagtcactcaaattcctaagtctgaaaaacactgtgctgccaaacacacccatctgtaatttgaatgtggccaaagacccacaatttgccacccttgacttgcattatctaatgtttttctttctgtatattatgaagaggatatttattccttcatactaactttcttcagtctgcttgaggtgatgcccttccacatcattcataatagtttcttgtcttctactattattgacaacttcacttttttaaccttataaacaattttaaattactcggagctgtcatccattagatataaaaattaaatggagcccaggaattctaggtgatgggaaacattatccagggctgtaagacatgcacaactatgggagtccagcaaaggctgataagcctggagctccagcaatgttgggtgagcatttatttaaagggagctacttgcttcctggtttgactgcataccaaatatatcttctcaacatttatgagcttaaatagatgcagatgttgccagagagtgtattgtaacattcatcatcctagaatcatataatttaagtgttgagaggcatcttggacttcggttcaatactctcattttaagcaggaggaagctgaggttcagaagagttaactgacttgccacaaagttagtggtccacaaaccctgccccataaaaacattgttgagggttgacaaattttactaccaccacctccgttctctcatctggattgctttaattgtcctatacactatgcttgactattatctcctcccaattttcaagaagaaaattaatgagaatttttttttcctgaataattcttctttatatttcgtgggcatcccttacttctctccatctccccactgttgatgattttcagagctgtgttctttctcatgtaagatggaaattaaaggtgaccagacactgattttggccaggtctagtgagaggagaggggttagtttgttttctctaactctagcctgctgctgatcactagtttatttatttcatggcctctgatggacatcagactccaaatagtgagagccatggtgtgctgacactgtagcagaaatcagttctttccatccactaaaaagacaactacctccttggtgaaacctgaaatgatcttatgaaatctcatcctgtagtgactttgcaaattacctcactcctccttttctgttttctcataaatatatgtgcagactgtctttcctcaaccacaaaggaagtgtaaacatagtttatctgatgttttatgaattaaataatttctatagccagacttatatgatgtacttgatgttttatgaaaaatcttcagtgaggcccatttaagtgtaggacagtctgccctccagcatagaatttgaaccaattctaagcaaagtttggctgttatatcctcctactttcctgccctacatactctccaaatcctagagatgagtactctggggtcttcctattatcctaaactcactgatgtaatagtctgtctggtgtgttcttcttctcagattactcaaaattctctccattttctccctttccctcctgaacaaatttcactctttgggtttaggtcatcatctcagctaggctgttatgaagaagcattttggaactaaataatactcacgtgtaaatgactaatagatcatttatgttctcaaaggaagatctttgttcaccatataatcttcttattggtggaatttcactcaatgtgtcaaagggaaggaaaataagtcaaggagaggggaaggtatttttaatcttgtttaagattttatgtcttaaactgagaggaggggccttagctacaatgtctatatagtctgtgtcaaagaccgtgtgctctttcaaggatttttttcccagtttgtgagttttttcatatttaaaaatcttacaaagttttattattcaatcacaattcagttggtcacatatctaaccagcaatcttcattaaatttattaaaaagtaaacttacatgaaatttcagagtaccaaacatttaataatttaaaaaactatgtcttcccacactatcaagatcataaaacacagtggtggcctgaaatgggacattcgtcactaaaaaacacttcagccatgtgacggtattaacagaaaagggttcttttccaccaacttgaacctcacttggctgagattttctcaccacagtctttgtatttttttttcccatgggcaactgcccccttgattaatcccatttcccttagtcctagtttttccaggcagctgagcaaacaaagatgcaggcagccattttaacgtgcttcctccctcaagccctctgggatgggccgtctgttcatcctgttcataaaccaacggcctgaatgggcttggagaaagcagcaaggatcttctgtcaggattaattttaataggccatagtctgtcacccgggaaccatagcccaggcaaatggctttaaattactatttgctgataaaaagggagatatgagctgaaaatttggttcctcatttaaaacaacttggataactaatgcaagaatttacttttagtgtggagtgcaggtactttacagcctaaacccttgggtagctgaggaaaatcttttgttgccatgggatcacagtgaaatataaagaggggaaatgtggcagtttgtagaagtatagaattttagagctggaagggaaataaaaaatgtatctgtgacttcctaaggacttacgtttagagctttatatttctgatttctgtgcagagaaacgcgattcctcttattgccccttctacttttttgtctccctctttaccaattcctttctctttcctttttttcactgtttttctcatacccaattccagttccttgttccttcccttggttcctcatccctcaccagccaggctcctgtcatttctctgtgaagctctgcactggggggcacatgaggtagcgtggtgaatgtagcccctaggcaaacaagtcaggaggccctagctcttgtctcttcccttgtaaagtgtgagaaggcagtttgggggactgactggaagggatggttttgtaaaatgacacactgatgtcagccattattgttcaataaagtcctctgtgtaccattcataagtaatttttttattagctatggccattgttttggtttgtttaaaaattcagaatgtggctgggcatggaggcttacatctgtcatctcagcactttgggaggccaagatgggaggatcatatgagcccaggagttccagaccagccctgggcaatatagccagaccccatctctccacacacacacacacacacacacacacacacacaaatcagctgggcatggtggtgcacaccagtagtcccagctacttgggaggttgaagcaggagtaacctttgagcccaggagtttgagactgcagtgagctatgattgtgccactgcacttcagcctgggtgacagagggagactctttctcaaaaaagagaaaaaaatcagtgtgttccatactcaaatggatgcttccaagaaaaatcatggaagaaaatagaatttgcttcatacttctttatgacccttggttcccatctcttcctttccagccagctcccctcaactctcatagatcatatcacttgttcatggagaaaatgttctccacattcctttacaaacatgactgataccataaaaaatgtttggtgcaagttctgtaatctttcttaaatagcccagcctgggcacttgagcaagaaggctggtggctaaaattaaacaaaacataacaaaaccaaaaacaggctgggcgcgatggctcacgcctgtaatcccagcactctgggaggatgaggcgggcagatcccttgaggccaggagtttaagaccagcctggccaacatggcaaaaacctgtctctactaaaaatacaaaagattagccaggggtggtggtgcgcgcctatagtcctagctactcgggaggctgaggcaggagaatcgcttaaacccgggaagtggaggttgcagtgagccaagatcatgccactgcactccagactgggtgacagagcaagactacatctcgaaagaaaaaaaaatgcaaagaacaaaaacaaaacccaagtgtcaatgaagatgttgagcaacttcattgctgatagagtgcaaaatggtatagatactttgtaaacaatttggtagattcttagaaacattcatttaccctatgacctagttatcccactcccaagtgaaatggaagcttatgttcatgcaaaaacctatacacaaggtttatagtgacttgattcataatcagcaataacttaaagcaaataaatacctttcaactgtttaatgtataagtaaactcctacaatggactactatacccatagaatacaacactacttagcaataaaaaggatcaggttactgatacctgcagtggcataaatgaatctcaaaaccattatgctaagagaaagaaggcagattcaaaaggctactgtatgattctacttatatgacattctggaaaaggcaaaactctaggacagaagacaaaccagtagttgccagggataggggttcagtggagaggctgactacattttggggggcatgatagaactgttctatatcatgattatggtggtcatcacaaaactgtatgcatttgtcaaaactcagacctgtacactaaaaagggggaattttactacatgtaaactatatcaataaatctgacaaagaaaagaaatatacagtattaatttgcatgttattcattttaaaataaatggtattgttctgcaacttgcttttttcacttaaccttaagttttggagattaaaccttgttgaaatctgtagatttagttccttcattttaattgacgtagttttcaatttttgctaccactataaacaatgtggcaatgaatgttctgacacacgtcttctttagtacatacaccgagtttccttaggaaggctagtacataaatgctgtgtgttggattgcagagtaggcacgtcttccagtttactagatgtgactgcatatctttcctaagtgtttctgccagttcagtctctgtaacacatgagctcctgtttctccaatcagaaagagtttggaatttttaagatttttttactttgcatttccctgaagttgaggatccttttttaaagcatgttttctggtttttccagtttcctcttctgtgaactgttcgtatttttcctttttttttttctgacttgttttgcttattgatgtataagaattctttttgtaaagtgtgagtttttgtattctggatgccagcttgctgtttatatgtataatagcctttacccttctacactacagaagtttttgccttaatgtagttaatttacaaattatttcctgtaaagtttgtaaaatgtgtcttaagaaatccttcctaaacttgtgatcattgaaatgtttttctgtaaatattatttttcaattttaaatagtagtttgttaattcctctggaattaatcctcatgtctattggaagtaggaaactatttatattaatactttttcccatatacacaaccaatctctctagcactatttatgaaaattcactctttcctcactaatcttaaatctcaaatcaagttcccatatatgcatgggtctatttcggtgttctctattttgttccattggtctatttgctgcaacaattatataaaattaataaaatgtaattaaaaggccaggcacacagtagggccaaagcaaaagctagcttcccccactcctcagtcagctctctaaccctaaagtctggtcatcagtgaagtcttggtttttctaaaagaatgatgctgtttggctcccttgttggtgatctttattcccactgacttcatctggtccaaatctctggccagcctctcctttaaattcccttttggtactagctccccactaatcatcaatctgctgcctgcatacccccaacttggcccagtgtcactatggccaagtctaggcatagaggctggacatgcttctgcattgccccataacacccccaccccctcattctccagcaatccccatgtggcggtcgggccatttctcatgctgagaggcccaacaagtgtgaagttgaacactttcagtctttgtacattgacactaatgtatcccacattagtaatccaagtgaaggaagcaaaattaaatttcttaaagaaaaaaaggctgggtgtggtggctcatgcctgtaatctcagcagtttgggaggctgaggcgggcagatcgcttgaacctaggagttcaagtctagcatcggcaacatggcaaaaccctgtccctacaaaaaaattaaaaaaaaatttagcggggcgtgggacacacacctgtagtcccagctacgtgggagggaggctgaggtgggaggattgtttgagccaagaaggctgaggttacagtgtgccgacattataccactgcactccagcctgtgcaacagagcaagacccgtctcaaaaaagaaaaaaaaggtcagaatttaagagaggaagagagggtcgaaggagggaaatacaaattcagttttggacaggttgagactgagaaacctttgagacattcaggtggtaaggcctttaccctgactctaattctagtcccagagcaaaaccccaaaagactcctgtgcttaaaagcctggagagattggtaccttggaatttatggtaagagagagttttaagagggagaaactgctcaacagggtcagatgctgtgagaaggggaaggactaagacatattccttgaatctgacagccatgaagggatccatggtgcttgcaagatggtgaagaaatggagtcagagaatgtggacaattcttttaggacgcgtatctctgaaaaaagaaggcaggtggaagctgggggcagcttttaactgctttattggggtataactgacgtgctatacactggacatatttaaagtatacagcgcaataagttttttttaattttctctttttatctctagaagtaagttttgacttatcaaatgattacacccatataaccatcaccgcaattaaggtattgagcatccccgtcactcccaaatgtttcctcctgcccctttgtcatccttcctcccagcctctccctgacaccccacaacatccgataatcactgatctgctttctatcactatagatgcgttcgtattttttacaattttatataaatggagtcatacggtgtgtaattttttcctggcctctttctcagtatactcgagattcatcagagttgttgcatgtaccagagtattcgatcatatgcacagactacaacgtgtttatccacttacctactaatggattgtgtcaagttttgggctattacaaataaagctgcaatgacacttatgtgcaagcctttctattaatatatgctttcatttacctgtttctcttaggtaaatacctagcagaagaatggctgggtcaaacggtatattttaagaaactgccaaactggtttccaaagaggttgtactattttgcattcccattagcagtgtatcaaagttccagttgctctacatcctttacaacacttggaatggtcagtctttctggtaggcatgtactaatatctcattgtgattttattatttattttttcttggatatagagtcttgctatggtgcccaggctggtcttgaacttctgggctgaagcaatccttccacctcagcctcctgagtagatgagattacaggcatgagccaccatgcccagcttctccatgtatttttaatttgcattttcctaatggctaataacactggtcttctttcatgtgcttatttttcacttatatatcttctttggtaaactgtcttttcaaatcttttattccctaatctggaaagtggtgcccatcacttctaccatatttattagaagtgagtcagttaagtccagtcaacattccatgggagaggattacattggagtgggacactgggggccatcctagaggctgtctaccacgtgtggcttcccatttcttttagggtaaaatccaaactccatatcctggtctacaaagccctgctagatctagccccagccttccacattgcttttttttgttatttgaacatgctaagctccttctccttttacggccttagtatcttctcttgcctctacttgggatgtttttccatcagattttcccacagttgatcatttgtcatttgaagtcccagcttaaaagttacctcctcagaaaacccaacctcagtcacccaatcaaagtagtctaccagtcactccttatcaaatcactctgtactaattctctatgtgactcttagtactgatagaataaaagtttcaatgtaacaggaaatttctttacctcattcatcgttatatcaccaaatcctagaatagcgtttcacttgtgatagacgctcaataaatatttacttactgaacaaatgaatgagatctccaaagaagcaagaacagatgggatccatagtatagctgaagggattaaccttggataaagttcctgtgactactgctgtttaataaacgaccccaaatttagaaaaggcatagtgaagatgtctctgctccacaatgtctgaggcttcaatttggatgtcgtgaaggctggaagtgactggacagttggggctgaaattatccaaagttttgctcactcacatgtctggtggttgatgctacctgttggctgaaacttcagcttgggatgatagccaaaacatctacgcaaatgcagacttcttcatggcttgcttgctgagttccaagagtaagcacttcaagaaagctaggtagaagttgcatcaccttttgtcatctagactagaaaaatcacttttgctctagttataagcacgcccagattcaaggatagagaagaataaccccatttcttgacaggaggagtgttaaactcacatagcaagaagaacacatttaggatgggaaatattgttgctgccattctggtcaactccaactatatcatggccagttttgtggccattcatgccccaacaatgacaatcaaagcaagaaaacagaggagaacagcctggaaattctaaacatttatgtttatcagttttacaattgattgtcagtttttatcttcaactaggtaaggacaagtggaaatcattcccaggtcttgtttttgttcagtgtccttgtgtagcttcgtggcagtgggatgtctataggtcatcttggcagcacctcacgtgactaatgaaattttcctttcccttaattctgttttgaattttccttcctttcaaacgcagccaaatttattagtttactctgagagcaacattcaggagattaatccaagtaccactggaaaagtgattcatctttttaatgagcactgaaaaacacaaacaaaaaaaccccaaaacacttgcccagattcatttttataacggatgggctctttgacaggcaactggaattctttagcagagattagctgtctgtggtttgtgggctccatttcctttcaagtgtttggttcagctgcaaacaggtataacctgtagcactcattgtttctctctttagtcttcatttctccattgttaaatttctccattttatatcttcttctctagacactgctgtgaaaatttgtgtcctagatatttattttttgtttcataaattataaaagaatactttgcctattttccttttgaagtgtaaataggctgcaagtagtctgcttctgttgtagagtgatgttttccacttgccatgcttcctggttactgacaaaattagacagtttgtgcttggatgctggtgggaatttagatctgtattatgatatcttgaagccctaagccatactgtataaaagattctatcccaaaccactgaaaaatctacacagtaatgatgattaattatataaaaagcttaagatttgcatataagaaacatttcattaagagaaagaggaatatgggggaaaggtagagaaaaaaatatgagagaaggagattgtgtcaattactacatgctatgttcctgagaggagacagaaaaagtacaattatagctccctcacagaaaggactttacaattttgttaggaaaggaaaaagaaatctcgatgcataacacaattagagaagtataatatgcttcatgcagtgaggttccaactttaactaagccctataattgtgctgaaaagaaagagaagtttggtttggaataacatgggaaggttcagggaggaggtgagacttcagccaagacttacaattggcaaggggagaagagatagccttccacaaaagggtaacagaagggggcaaaattctgaggcctaaaagaaaggcatccttgccttggggacacctgtggcctacaatcagcacatggggagttcactactgtgggagaaataaaggcctccagctggggtccaggggtggggtgagggaggcttgcggggtgcttatcactgtaaaccaaaaataaaatttgaaggtccgccctcaaccgtctgaatggacttcctcctgtagtccagggtcctccaaatttaacctaaaagactggcttaggccatgatgggaagctgaggtcagacatgcctcattatgcccttctttcttttagaatccaggaaaagctacacagcatttaatatcaacacatataccttgagtctgataagaaacacaacttactttctctgaagcctgctaactggaggcttcatctgcatgataaaatttcggtctccacaagttcttatgctaacctagacattcctttaaatcaattaccaatcagaaaaaaacttaaatttacctataacttgggagcccatcttgccccacacccgctctgctttgagttgtcccacctttgtggattaagccaatgtttatcttaaatgtatttgattgatgtctcatgtctccctaaaatgtataaaaccaagctgtgcaccaaccaccttaggcacgtgttctcaggatctcctgagggctgtgtcacgggccatggtcactcatatttggcacagaatacatctcttcaacattttacggagtcttttttttttttttttgtcagtaccacagacaaccacctgactcgaggaccttacctatttctcattcagccaatgctgcagcacgttattaacgtccttgaaagcaagtcttatacagagaaaacttattttgatatattaatgaatctgatcagaatggaccagattggggggatagataaatggttgcaattgtgctccctggaatagctttggagtttacctagatcttctgtctctttaggacagagctgcttgtgtttatatagcatcttacacaggattgagacaacttcaatttcctatatcaaaaaatcgggggagggcggtgggttatgggggtgttcaaacctcccaagtgacatctgctgtgactgcatgtcttcctactctttccactgggatgcacctctggtagctgaactataacgagaaggtaaaagctgtgtccaatacctattaagctgccttcttctcaacagctggggaggtggcgggggtgggggggggcggagggaagtcttttcaacagttttacacatttggaaataggcctaaagtgaagaaggggattttcaaattggtgtgttggaaaaggggctgggcttttgagtttgaaatctggtgctgtcacttactggttttgtgccctgggaatatttatttcagttttcatgcctctgtttttctataggcaaagtagaaaattcgaaaaggtcctcaacgagtttgtacagctgctcccactccctcatcacctcttgtgggcctttggaaatgtatgttggaggagacattttggattgttgcaatgacttgggagtgccatagcacctagcaggcagaagccagaaacaccaaatgtcttaacaatgcttgaggcggtgctacaaatgaagtccttctccaaatgcattgagccccaagaaaaatcgctgattctgaggaaccttccaactttaacaatttcaggacgtccctaagctgagctaggaggcaccacgcacaggccggaggcaccacgcacaggccagagtctcccaaatcctgtcccgcactctctcccaccttattaatggccagctcatctttcaagtttcgacttgaaccacttctcagagatatcttcccaggtgcccatcccaacgttactattatatcataatttgattctccctccccccatccccccgccaactctgtaaaccccaagtataacacaggacgttgctatttgttgactgacacatagtgcttggtgaggtcacgctggcgctgaatactttttgtataaaccgacgaacagctgatgaccgcatgaatgctcacacaaggggaaagggcgccaagccaaggagccggcgtcatccgacgtaacttccgccctttaacgctcctgcggacgcccccttctcccagtccgtgtttgtttccggaatttcaataaagctcgattcggctcgaagaagaccccgttcttccgggaaaatggcgactcccgctcgtgccccggagtcaccgccgtccgcggatccggcgctagtagcggggcctgccgaggaagccgagtgcccgccgccgcgccagcctcagcccgcgcagaatgtgctcgctgccccgcggcttcgagccccaagctcccgaggacttggcgcagcggagtttggtggagctgcgggaaatgttgaagcgccaggagagacttttgcgcaacgagtaagctggggtcccgcggagtctccgccaggctccttcagctcgagctccctgggcgctcccctcccctcccgcactctgttcccttccctggaaggtgactttgactcagtcacattcgcttcagtcctacgggcgagtggacggagggcttgctgcggcagagccgtgcctcttcctggccaggcacgtatgcctgcgaggatagctcggattgaacggctacctggcgttgcagggagttagtagcccctggtcggttttatttacccggggactgtggtggttccatgagtctgctttctaaacccttttgtcgcccgcacccctaacccataacagattgtcagcttcatctctggattctaagcttacaggaaccgtaggaaatgggaagagtgggatatgaagaggggtttattaggccgggaaagttcgaccctcattcagctggctggttgaacggattttagcaagggagccacgtaataaaagtgattttgttttttaggcagctttgttcagcagcttgttgcaaaagatggtttgaaggaataaaaagcagaagacagtagaaggatattttcagagagacttcccacgagacacttgtaagaaagtgagctaggaagggattgggagaacttttaagcatggactaatttaaatgcagttgacagagatggctgaagtttccaatctatatggaagaccactagcaaaaataggaaaattcagggagaggaatagatccaaggttgattttacttagggtgtgcagagttgagaggagagcaggacagacatttggttaatcgaaaaccaaacacttaaaagctggagaagtagtcatgaggctcaagaaagagagaaccctggaaaaatacagaaaacaggaatttcagctgtagagtgttgttaatagttgaaattgtggggatgaatgtagtgtcaaaaagaacagaggacttaaggtgtaattttttctttccatttattgtatagttaaagaaaagggaatcagaaaaggaactctgtcatccagcaaaagggacaaataaataattggttgggatcaagacatgtgttttgaccttgtgagaataggttttgaatgtatagcagtgaattaactttttggtctcaggactccgttatactttaagaattattgacatcccaaagagctattttatgtgttgtatctagcgaaatgtatttacttatcagaaatacgtctgaagtctttaaaacataagcatacacaagcacacattctattctagaacaatgatgtcatcacatgccatgtagcctctggaaaactccactgtacccatgcgagaaaatgagagggaaataatatcttagtattattatgaaagtagttttgacctaataggcccatccccacactccaccccatccccaaattttggagattgcactttaatgactgctggttcttggaatgtcttatgtgattattatatgcttaaaatacttttgctgaaattctaatttgctgagacaaatgaggcatatattccctattcttcctgcattcccttgttttttgggctatttggataatgaccattttaattgttttattcttgttttggggcagttagaaatcagatatttgacttaaaaatcagcttttctttctttgaagataatgccttgcctttttaatgttatatctcaagttaaaaaaatggctgtaatgtaatagtattcttttccatttgacagaaaattcatttgcaaattgcccgacaaaggtaaaaagatctttgactcttttgccaaactgaaagctgccattgcagaatgtgaagaagttagaagaaaaagtgaactgtttaaccctgttagtttagactgtaagctaaggcaaaaagcaattgcagaagttgatgtgggtacagataaggcccagaattctgacccgatacttgatacttcatcactagttcctggatgttcctctgtagataacatcaagtcatctcaaacctcacaaaaccagggacttggacgtcctactcttgaaggtgatgaagagacttcagaggttgagtacacagtgaataagggcccagcttccagcaatagagacagggtaccaccttcatctgaagctagtgagcatcacccgcggcatcgtgtttcaagtcaagcggaagatacttccagcagctttgacaacctgtttattgacaggttacagaggatcaccattgcggaccaaggtgaacaacagtcagaagaaaacgcaagtactaagaacttgacaggcctttccagtgggactgagaagaaacctcattacatggaagtgctagaaatgcgagccaaaaacccagtgccccagctgcgtaaatttaaaaccaatgtgtaagtaccctcggaaacaggcctgtaacaggaacgtgatatttgttaaactcaaaaatttacgagaaactgggtgtggtggtgcttgcctgtagtcccaggctactcaggaggctgaggtgggaagacagctttgagtccaggagttgtagaccagcttgggcaatataataagaccttttctcttaaataagtcaggagaatgctctaagttccgtgggctttgtatgagaactacttgtagttaggaaataacatgttgtggcaacactgagaccagcctggccggagtagaagattcatgttgaaaaatatttagttttgaaaccaaataatcgacaaggtcttttaaagcacatgggggagtgttaaattttaggatgcttagccagtatttcataataaacacagagttggagagaatttattatgacttctttttttcagaaccattttttagtgtacagctttgattagtgtactatcaaagtgtactctctttgattagtctgtgaactaagggtaaagcaattgcaggagctgatgggctttccagcagaaattatttgcatgctcactgtatgtaagcaagcagcaggtgttgtggggacacaattaagtcaagattcttaaaactcctttgccttttttgatgttaaatctcaagtttaaaaacatggctgtaatgtatacatgtgtaatgtaatacaataccatgttcttcaaggagtttaagagctacatgaggacccaaggtttacacacttggaaaagagttaagctacataataataacagtttcagggggaaggaagctgagaagaggtttgaaaaactgtgaaaatagattcaggcaggataggcaaaaactctgcttatcagttccttgccataaatttgtttctgaaatttcaggaaaagtaaaatctttttgaaaataattgctatttacttgcagcaaatgtaacattcaactcaggtaactggtaccttcttcctatattgtatttacaagtatgtaacatcaaagttaaatcactactacctttctttgaaaaacagaaaacctctagtgaaaagtatctaaaacatgcttcttttttgttagactttaattctaccccagcattcattttaacctcaaaacattttatttctgctgtatagaaaatcaggattatactacattaacgtgatcaagtactctcttgtgtacagtggggtatctttcttcacttccaggatgacattttagaaaactagaaccatcatctagtcaataaataaaacaaagaatacattaatcccagttctgtattatggtcatttagctgggagtgggagagaggtaagggaatagtgaagagggctaccaagaattcaggaagtttaagagacagggagcctcctgtataagttagaggagaacaggaaaggcagggctttgaggagtccttaggccatagacaggtagggattgagagggttccgtgtgagaggtggcttggaggttggaaggtggggtcaggtagtgtcctttgggtcctttctgctcttccttctgcatactcttctggcttcatgtatcacctggatgctggaggctgacccctgtgcacctctatcccagatcttcccagaactttaggtttgcatagccaattaaccatgaaacttgatcacttgggtgttcccaggtacctcagcttaatgatgtacaaagtggaactgcagtttctttccaaggtgatttccatattccctaatagtgccaccaccttctcggttttcttcccctaaggtatcttcgatttttctcatctccatatctgctagccatgaagacctacttatttctttgatcttcatctctataattgttcttcatcttctgtcgaagtgaagactctcatctctctcgggctgtaattgtggccccttctacctctagtcttaactaccagtctatctccactgctgccagagtgaaatttgtaagatggaaatccgaacttgttacggagaactcttcattgcagtctgggcctaggctacttcccagccctctttctcgctgtcttttctgtgtagccagaaaagctgagtctgtctaccttctgtactttctctcactccccttgctgggatgcacttctctccttatttacatgggtaagcagttattattccaagactgttcaaagcttttttgaaacttttcttagcctccctgtctcccactagaactggccatttccttatgttccaatgtatcttgttgagatatctatcacagtatctctggtattgtattgcactgaaactttacatgtgtatttctttctactgggcaataagcccttttgcaaatgttctttgaataaatgaaaaaaaaaaaaaaaactccagatgaaatacaaggtttgaataaggaaggaaaaggcaaagagcctgtatgcacacaaacacacccctatttgttagagcaatgaatactggtaaattacttactgttacctttggaggagaattaattgctaaggtaaaggccatttgtgtgaatgttttaaatgtgtctacaaataaaataatctgattgtataacacaagttttcctttcatcaggttaccttttcgacaaaatgattcatctagtcattgccagaagagtgggtctcctatttcctcagaagagcggcggcgcagggataagcagcatcttgatgacatcacagcagctcggcttctaccacttcaccatatgcccacgcagctgctctccatagaagaatccttggcacttcagaaacagcagaaacagaattatgaggtatttagagtattttttttcttgtctgtttgttgggtgctgcttacataagctagaatttactccaggttcaaggaggaaggaatggaatagaggggattaggtgcttccatgagctcagatctatgccactagttttcagagagtcacaaagttgctagaactgcaggaagtagctagagatgatcacagctaccttcaacattaaagtggtgatttgcctggagatgtggggagacttgtagaatttcatgtcttaaagctcatttacctgcctgttcctgttaggatagtagtagcatcgcatctctccctttcaccttgtaaaactcatgtgacagcttctcagtggcggactcaaacccagaccccttgttagagaatgaggagaatgtagttcccaggcttccatcttctgcagtacaggggagggcatagaaggagtgggaggataatgttgtgtagccagcagacagtgagacactgctttagagcataatctgcaggcccatgtgaagagagaaatatctcctgcttttggcagcttaatcaattttgcatagcactttgtttccatgtgttttgcattgaacttcaaacatgtatgttgagagtttgtatacagaataatgggatgggagaaaataagtgtgaaggaccataggggaacagaaaagtttagaagtatttagtaataattttagcctccaggagaacagtatcctgtctcacttcctaggtattgattagctagattttagtcaggtactagtgcaccaactagtataacaccagactgttcaggagttcgagaccagcgtgggcaacatagctagactccatctttaccaaaaaattagccgggcattggggcatgcaactgtggttccagctacctgtggggctgaggtaggaggattgcttgagctcaggaggtcgaggctgcagtgagccgcagtcacaccactgcactctgtatagcctgggtgacagagtgagaccctgtctcaaaaaaaaaaacaacaaaacaggctgttaatctgctttggcttttcataaaagccttggcatggattggcattatcaaggtgctctttttgaaaaaaaccatttttctttcagtgcattaaaatgactgtctagttatggctgtagcattgaggaagtgtttactgtctctgagctcttaaatgcctgtcctaagatatttttaggttgaattaaacccttcatctttaaattgtttttttttagcagagaagttgtagtggtaatagctcccacttttactgacccatattcatggcttgaagaggaggacatcaagaagttcaagaaagcatgagaaaagggaagaactgaattaggaatgacattgccacctaccatcagttggtggtaaagtccttgggagtttttaagtacattgccagtgtctgaaatttacttggactttttattggatactagttgctgtaggactttatttggagaggaatagtcagctttttagtattaatttcttgattttcattttgccattgaaatgtaattcccaagtctggaagtcatgattgtaattagggaagaaggtcctgtcagttgtagaaatctagacagcattagtccttctttttttttttttttttttttttttttttttttttttttgagacggagtcttgttctgtcacccaggctggagttcagtggcgcagtctcagctcactgcaagctccgcctcccgggttcacgccattcttgttcattcttgtgaacccgggaacacgccgggttcacaggcacccgccaccacgcccggctaattttttgtatatttagtagagacggggattcatcgtgttagccaggatggtctcgatctcctgacctcgtgatccgcctgcctcagcttcccaaagtgctgggattacaggcgtgagccactgcaccgggccccagcattagtcatttttgacatttgataggtcaaattgttatgtgagtgtgtatacatgtgcatgtgcccccatatttaacgcatctgtatttataagtattgtagtgctaagctcattactcagtttcttatatagaggagtgtatttcagtgcaatgttgtatattaatggaggtcagtaacttcaactgtagcaggctggtggctgtcagaagcattacccagttgtgtctgatagggcacagccatcaggcttgtattgcccaagggagcactcagtgaggtgtcagtgtccctcttattgctgattctaggtaacttcccattgaaaaattgtaaggaagagatgtgaacgtgtaactttgtgctttgctctttgttttaaaggagatgcaagcaaagctcgcagcgcaaaaattagctgaaagactgaatattaaaatgcggagttataatccagaaggggagtcttcagggagataccgagaagtaagggatgaagatgacgattggtcctctgatgaattctgaagataatctcctaaatcactgacgttgagatgtcatcatcttacatcagactttctaactagtatcaagatcagtgtcagatattgttgagggaagtaattttataaagttacacaaaggtagttataaaaaaagcccagtttgtctttcagaaggtgactttcatgtgcttgaaaagtttaatatttgaatattgtgtttaaccacatggtattaaaattttgcaatatattgtgtattggtctgatattttagtatatagtagaacatactttttttttctttaagccaaatgaaaagaggtaactttgcttttttcctttttcttacctatcaaatagcatttattacatgtctttcagtgaaatacttagttgttccaggcacctaaaatcaattaggaagacatagttcccttcttttttgggtaatgaagggagcagtctaaagaattgtatgcatgtttgcatggggttattgagacattggatgtgaaatacctaggaagacatgtatggagaatgcttaacaaatgctcttctcctttttctgtcttcccttaggaagaacgttatctctcttctgattaggaaggacttcccttttgagtagatgctggaaagtggaggttttttttgttggtttgtttgtttggttttgtgtttttttttgagatggggtcttgctctgtcgcccaggctggagtgcagtggcaggatctcggctcactgcaatctaggtggaggtctttttaaataacctcatgttacttcaggcaaatctggtacaggagaagcccaagctaactgagctgggtgaaggcttgtgcatcacctggcttgagttccttgctgtcacagatgataggttcatgtacacaacattaatgtttgataaggaaagcattttttttttgttaaaattgaattgtcagtactttacttttttccccccaaataggtatatatagactgcagaagcttcagtcccatatataaacgttcatgtcattttagaggattatatggttgtctccagagaaattaacttacattatcaaaaaattctttgtctaatatattggagtctttaaaagtgttgaagaataaaatattaattagaacaacttcaaatgctaaggtgatgttttaccgggacttaattaaatacaactttttcctttcgaaaaagactgttcacatttgcttccaggtgtaattattgctttcattccttacccccctcaagcaaatgtgaaaagtatactgacctaagattctcattagttttagttcttaaaacgaatagtaaatgatttcacagcgtaaaatttgatgttatttctggaagctggatgatatggaagagttcatgtgcctggacacacagttccctgtaatcctgccatctagggagataaactctgttaacattttgatgttgtgtttttgcttatttttctatgcatagttatgcatttatattctcaaaaatgaaatcataatgtacattgctttgtagtctgctctatatattgtcaatatgttcccatattaaatattttgctttttagacagctgtaggatattttatttcatgggtataccataactttaagatttatttcctattcagcaatttgattatgtattataatgtaatctgtaaatagtgatatgattaacatcttaatcacatccatagaaaatgacttatttccagaagataccgctctaaaaatgaaattgttaggtgaaagtgtttttgagaatttttatatatattactcactgcagagatcatgttcatttacattcccattagcaatatatccaatgctcagaattgaaaattactacttaaaatctttgcaaattgaataattacagaaaagggctacatttaaaatttgtatttgtttttcttacttagtgaaggttgtgttttttttcatattcattggccatgctatattcattcttttgagaattgctcattcatattttttctgttgcttgcttggagaatttgctctttttttggcatataagttcttaagaatgtccgtcctttgtcatatattgtaactttttttagccttatttgtcatttaacatagtttgtggtatttcagtatagaagttgttttctttaggagtctacctttgtgtatgtgcttgaaagtatttttgtaatccaagaatggataaatgtccttattttcttctagtattttcttatttcacttttacacctatctttaaaaggaatttaaattttgtttatatacattaactaaatcagtacaagtttggggtgaaaaggaaatttttaatccatctcaaatgtatttggttatattatataaggtagggatttgattttatttcgaagaatttaccaattggttcagtatgtgaaaccaccatttcccctctgattagtaatgctatttttatagaatattaaattcttatgtgtcttttgtgtcttaggccaatttctgggccttctgggttttttctacactgtcaataattatcgctttaattggtgttaatatttggtagtacacaggttctcccttgttcttttaaattttgtgaaatataacttacaaataagtacttaaaacagagcttaatgggtaaagcaacagctgtgtaatcacaaactagatgcagaggaggtcttgccagcactccaaaatctctgtgtgtcccctcttgacactcactgtttcccccagagctaactatcctgacgtatggtaattctccctctgtccttttaagaattattttaccagttatgtgtataacaatatggtttacattttgctcacttttgacttatataaaaatagaataatact

SEQ ID NO: 73 - DNA, 125639 bp, Homo sapiens
  allele (1)..(125639): GRINL1A Variant Allele (SNP2)
gctgaggctgcaagtagccggcgccgtcccgcgtcgcccccgcgcagggcgggccccgcacgcttattctgcccgggaggaacgccggcgtccagcccgctaccgaccgccgctgcgggatgctgcgctccacgtccacggtcaccctgctctcgggcggcgccgccaggacgcccggggcgcccagcaggagggtgagtagcgggggcgggagccgccgccgtcccgttcccccatcccggccgccccctctagaggggactagggatgggaaagctcgggagccagcacctggccccgacgccccaccctgggctcaactccccggtcctgtgccggctctggcagtgaccctcccgcttgaggtttcagggggcccaccagctggtaggagagggcttaggggactttatggaattcccagagatttcctctccttcctgcctttctgtcaagccgagtttattggcggcaccagtttaaaaatgaaggaagacatttgtgcagtgtccctaccttgagactcaaaagtaatgaatgtatttaaaactcaaactttccttcttccattaattaaaagaaagatggggtcacttgtgtccactagtgatagggtatccactagtgatagggtaattctggagtggggttagccaaggtgggcaaaccagaacagcagccggccgcccaggagcccgactgtgtgggactccggtttatgtaaaccactttcttctgtctgatttaaatattagcacagtgacaacaatggcagcactgaaagcttgggacagcatctccagggaaggtttccctttggaagtgctgtttctttttgatctttgtggcatcttttcccatctctccagatgctctgtaaaagaaatgctccatctttctaacacggtcagcaccttagagccacagccaggggcttggcttgtggctttttagttcttccatttatcatgatgttcaatacttatcatttggtacctctttgctctgattgagacttctgtaatcgtgtttcctcaagatttaaacaggtggttaagtccaaagcaaaacccccactggttctgtctgcgtgcaggcttggacctgcttatttgcttttacatgccttaagcgagtgatggtggtcaccttataagctgtctttcttagctctagaagaaaggtgtgttactcttgggcatgggccaactgatggattctggggtgtgtgtgtgcgtgcactcaccagacacttaggttgtgtacacaggcgcacacacacacacacacacacacacaccccagaatccatcagttggctcatgcccaaggttgacagaactccagttgtccaatcattagcatcatagagtaagatctacattgggtccaagggggtttccaaccacagtcctggccttactctaagttgggtgtttgtatttttctatggaaatctttctcaatttgaacacaattgcaactgagaaagaatgaagtcactgaaaagctaaccctgagccctgagaggatcatatgtgtgaccagactgcatgaattgcatgaaattctctgtaacttcccttccagaggtggggattagttggggtacctaacctaatacggtgggttgatacaaatgtgactagtatacaaataacatttctgaagattttgggtcaaacgtttcctttggaatatttatttaattataggtgctttgctgtcggacacattgtgacactcttgaaaagactttgccttttgaataagatggcagacgtattttggactggagaactcagggctcgggatcaggccattcagggctgtcctgggtacactggtacttgtttctggaaggaaggtatctaaagggtctagggttctgcccatctttatggtttctagctctgctcatgatttgcagatgttacaagtactatctgtgtgtgtgctggggattgtgtgtgtggtgggaagctgtgagatgttgattaattgatttattgaacattcataaacctttctctgtgtggtaaagggctggcattggggtccgccctacctgtagaggcagacattttcccaaactaacatcaaacaaagtggtgatggttatagtggggtgaagagtttacaaagttctgtagaagctaaaataaaggttcttcctgaggcatcaggggaaggcctctcactaaaggtatgtttttttgagatggagtctcactttgtcatccaggctggagtgccatggcacgatctcggctcactgcagcctccacctcccaggttcaagcagtcctcctgcctcagccttccgagtagctgggactacaggcgcacaccaccatgcttggctaatttttgtatttttagtggagacagggttttgtcatcttggccagcctggtcttgaactcctgacctcaagtgatacaactgcctcggcctcccaaagtgctgggattataggcatgagccacccagccccgcctactggtgatgtttgagtttaatcttgcaggatgagtagaatttgtaggggaattgacattattgggatactgaaaggaggaaataaccatctcaatggaatacttggcatatataatcatgtactgcataaccacattttggtcaacagtagccaggatatatgacggtggttggaatggtaggctatctcatatcgcctaggtgtgtggtaggctataccatctaggtttgtgtaagtgcactctatgatgattacgcaacgacaaaaatcatcaaatgatgcatttctcagagtgcatctccacggttaagtgacacatgactactttatcatgatggcaaattggacctgctttgggacaaaatacctattgtttagaaaagcaggaacgggatgtcctgaaagtaaaattgtagaccaaataatcattggaagtgtacctttcattgaaagttgttcagcaaatactgtattgttctgttattcctctctgatgatggacaagtgatggtcttgaacatgttatccattaaaattgtatttctggttcatccaaagagctcatcaaattgggtactgcaggggaaaccagcctatgtgggtccagatattcaagccaaccagaagtggtggtgacagctgacactgagcagggactcctgcgagccagctgccaagggttatgtggctggctggactgccaccagttagcctttgttcaatggctgccacctgcaatttgtatttccttcttatctgaaatcacctctcaaggaaaaaaaaaccaacaggtggagagagtaatttctgtcagctgataaacaaagctctgaaaggcatttatggatgccaaccagcagaagttgtgaaattaaaaaaacttccttcaaaccagttgtgcactaaaaatagttttatctatggcaacagcaggaagacaaattgactggagaataaccacagccagaagatgaccttggggaatggggggaaacgattttaaaaatattgaccttgcttcatgcttttgaaaggaattttataaatgccagttagtcttgctaaatgggcctttgaaatggaaggttggttgtgtggctgggtcgtgtgctttgcggggaaggcatgtgttgctttatggcttccccacaaagcacacaaccgggtcacacaactgacctttcggcacaatacttactgccgagtatttttggctaagctgttctgatcctgggctgtggaatgatagatctgtcaaggatcttctccagcaccttgctctcttgataataaaagactgttggctggtgttgctgctatcgtgacccgtcactggcacagagaaaaaacaaaacccaacaaggtcacaggataggactatctcctagcctgcccttgctgatatttctttctatttggcaaaggcttcctctgttaaacactggaatgggcctgctagtcattgttccttggctaatgtgtccctctcccatgtcccattgctgcctgactgggctaagttgtgagggtttggaaccaaggcgtcctctgggctaagggcagggcttaaacctgtgccggtcaaaaatgatggttgtaggctcagaaaaagaggtgcccagctctatgcttttgatctttcacattgccttgtttgatagaggatgaacagacctgaattctggagactcgtaaggaaacttgatttcccctagacatttatggagatcccatggcttttctacaaaggatatggaatgtgattttgacccatttgtctctgggggcactgatggagtgctgcgtatgaggtccctgttgtagtttacctatgctgtgcatccatatctgaacaagagacctggaggctggtgtcactaagccctggtcactggggaaggctttgaagtcaattagcctcaaatgttcttgtctaattgagttcaaggagctgtgggcccagggctgactaactagagaccatgttaaatatttcaacccaagatacttctcagcactcatcatgccttatggtcttacggaattccagtacttctccagcacacagaagagcaatacagtggtgtttacctctttccctctttggtgagtgatagttcctaagtgtcaaccacactcctggctctttttcactcttaaaggccggggtgatctttctaaaatgctaaatctagtctcctgactcgtctgcttcaagagcctcctcagtactgccaggaaaaagttcacactccttagtgtagcatccaggccctctggtttggcccgtgcctgtgctgtttcccctccctatatgtggtcttctcagatattccaaatcgtttgccatttccccgagctttcgatgccgttccttgcctctttgcttttcttcatgtttctcctctgatgagtgttgtctcctctaggaagcctgccctgaaacctcaaccctccttctcgtgttcccctagaggcctgtgcatgccaccattacttgcgtcacctgtgattacctactggaagacagggcttaggaaccacccctccccaggcctggtggaataggcagttaaaaacagaaatctcaccaggtcctacgtagaggagccacagttaacattgaattggcaaatggaaaaacaggaagagaagccttgggttaaatccatcccatcacttctgacccacctgggcaggaaacgggtgacaaatacatgggaatgctggcccaggtgaggaggttgacagttctgggaagtcctccaaatattcgagttgcctcatcctgctgcacagttggagcttcatccctttggttcagtcagtggttctcaaccagttatacacagaatcactgggaggcttaaaatagccatgtcgaggcctcatcccaaaccaattaaatgggaacatcttaaagtacagaaaagcatgagtattttttaggaagcttcccaggcgattctaatgtgcagcaaggctaacaatatttctttaagcattactcccttctatagctttcttggaaatgcagacactcctgggacagtgttgcagaaaggtcccttgagccttgtgggatgaagggcagggtggtgatggggcagggagggggagtcctcgcactccaagtcacactggcatctttgtgtgccttcatccacctgtgttttctctctggatcttggcgtttggggcacattgtgtgcctagtacagaacacagccacagaaagcaggaatgttttgtatgcctctgagctaagaatggttttcacaggggcctgcaaaacctaaatatttactgtctggctctctacagaaaaagttcgccccaccctgatgtagataattgggctgcaagttcagggccacagcagagccaagaggtctaatctagatggggcatacactgttccgcatgcagcctgctgcaggctcctgggatttgatccttgtgctgagcagagagtgtggggtctgttccccctagccacacttacaagggccccaccttttatcattaaggggagctgggcagggacccacagtcacaaagtggaacaggcctgagagaaatgtaaatgcacttggctaatttccttagggaaatccatctttgtaaactggcaaacccctgtcacctccctgaatcatcttctccactccctttttatttgagatagatatttttcccctgggtgagccaaggtgcctgaagttgagagcatgatgttactggatccgcagagtaccccgtaggtgagacccaggccctcatctccacaaaagggtcagaaacaaggcctgaggggacccatgtagctccccaggggccctgagttgccaaaaagggttttgttgtgctttttcttgtggaggaaacctgaatgctacctgtccctcccttgctatccttcccaggggggttggtttcaagaaagtgcaaggcactccagggagtttcaggtatattcttactttgttttagttcaacctagaaaaaactacaaaacccaacactgagcgagcgcccatcatgtgttgatactatgctaagcaccgtaggggctatattaagtggtgacggtacaaagcttacttgatcactccccctatgttttcccttccgtccattgtgtggtgcatggaacactggaggcactgaaaaatgaccagttggattattgaaatgaactcagatttgaatgttagtctcttcctccaaagatttgaatgactcctcattgtcttctgactagagccagtgcttctctatcatgcatttgtagattgatagttcagcccctatctgtttgtccatttgcctgtcctacccaggcttaggctgcaggttcttattcttggaacttgccgacatctgtgtgtttggcacagactagaacgccttgcctgatagctgtctgctgttgttatgatggtgggttctccaaacctcactgacctgtaaagtcctttctgtccttctatacccagcttaaattgtatcccgagggtccttcctgagggactttcccatatattcccacctcccattaagattagtgttcttcttcctatattcccatgataataaagaatgtttacagagtgcttaatgcgtgccagaaattgtcctaagctctttacacacattagctaatttaatcctcacaacattcctaagagggtatagtattgttagttctttttacaactagggtaatggaagcactgaagactaagtggctttccaaaggtctcaaagctagtaggtgtcagaaccaatactggaagccaggaagtacatttccactatgatttaaccacaaagctatcctgtctctctacaccttgtattggttattccaagtgttcttgattgccttgtttgggtatatttctagattatgtactccttggaggccagcatttttttttttttttgccatcgtcgtaccctcatagtccctaaaaatatttcacaagtaataggtgctcagtaactgagtaataaagtatgctgagtccagcttcctgctttgatctcctggaaggaacccttgcccccagggacagctggttcggtagcagtggtgttcagggtaggatgcagttcttcgcattgtgcataacacaagccctgaaccagctgctttgggaacccctgggaataaagtgccctacctgcctttcaggcactgccaagcctggggcatctctggagattgtgtatccgagtttcaggagaccatggagatcagcctcgtaaaatgctcggaggtaaggaatgctgccttgatgttactcggggagattttcccatggggagattgcggaaggtgaatgaatggagggaggtagactgtactcggacaactttatgggtggttcaggggttactgtccttagtgcttctgttagggattcagagtaccttttagacctttagaatgtcccccttgctgctcctgaagcagtcctgtggaaggattagtctctttctggatctgtctcttcccgacatattttctcccagtctttgttattactataactactattattattttaatcaaaaccttacatatcttaacatcgttgccaccaacacagaaatctgtttccttaagaatatcttccgcctacatctacacaagttatcagggtatatttaaaaaattaaaatgggattattcttaatgttttgttctgcaactttctttcttccccatggccatacatttggctatcttgtaaggaagatgtgtgattctgttctaagctgggtttaaattgctcctgaacagccagtccatcagtgggtcagtgtttattaaagaaaaactagctttgctccttaatgttttgatcaaagcacctctgttgacaagagtaaacttcagacagggtgctgcagtagcctcaagcgcctgctgcaactgccaaatgtctttgaggtcatatgttttattttacaagttcattttattttatgcattctgtttaccttgtggctttgtatacctcagggtattgctcagtgtgagagcttcatataagggttgcccagctcatcataggaagtgtgttgaggaatatagatgggcagatgaagaatgggctcaagccaggggagggaccatctaacttttgagtgattggacccatgggaccccctttctgaaaattatgaccattaaggattacccctctaaaataatcaaccaaccgaaagtcatcacttacagtgttaatgtctctgattcattgaccaaattgttattttcatggaaacaggactgtgaggctaagcaggtctgtttcattttgaagcatataggatgatgataatatctagataatagtaaaaatatctggctgggtgcagtggctcatgcctgaaatcccaacacatttggaggctgagacaggattgcttgagcccaggtgtctaagacccatgtgggcaacatagtaagactctgtgtctacaaaaaataaaaaattagccaggcatggtgatgcatgcctgtggtcccagctatttaggggcctgaggtcggagaatcacttgagcccaggagattgaggctgcagtgctatgattacaccactgcactccagcctgggcgacagagcaagacccagtctcaaaataaataaataatcaaataaaaataaaaatatctaatattcatagaggcttactatgtgacactctccctttatcccattttacccttgagattcagagagattaagtaactttcccgtagacacacagctagtagatgttggagcctgtgtatgtgtgtatgtgtgataggcatatatgtacgtgtgtgcacacttgtgtgtgtgtgtgtgtgtgtgtgtgatgtggtgcaggagaaaaggacttccttttccctgcagaattatgcatggactagacccagcctaataggagattgttgagcaccacaggtttggattgtctctgtggtctgagttacactttgatgcttgtgcaaatgtcagactggtttcaaccagtctgaggggcctggagccagagagttgcctttctctggagggactcaagattccctactcaagatcagtgttgttgcccaccaggaaagagagctacctggtagtatggcttggtttctttttggccaacatgactgacggtgagctttgaaggttgcttgtaaagttggccccacaagaggcaatgatagccctgggggtcaggccacatctgattccggggtccctgggggatgatgcttgccaagaggaggatgaggatggagagggatcttgaaaccaagtcatgtgatttaaagaactggggttgtttcgtccagaagaaaggaagttcaagggacaggaggactgcctagaaaaaggggaattagtttgcagtccgaggacaaccctgggtccattaggtagaaattctggtgtaagctcagatcagcaagttagaggtgcctggtagcaaaatgcaatgccttggagggtggcaatggtgtacgtggaagtgctaacatgggtcccaaacctgggctccctaacctgttcatggaaaatgaacaggttggtgccacctgtcaggtacatttttgggtgttgggtttcttcaaaggtgggcaggttgaactcaagagatttttgacattccctctagccctgggcttctaggctgcagggtggttttgctaagaggccaccctgtggaccagtgcagatctgtgaacctgccaaccagactgggacgggggtggagaggatttgtttgctagggctgccatgaaaactaccacaacgccattggcttaaacaacagaaatttcttgtctcacagttctggaggttagtggcccaaaattaaggtgttggcaaggttggtttcttctgaggtctgtgaaggaactctctgttccaggcccttctccttggctgttgatgggtcgtcttaatgtttatatgatgatcgccctgtatgtgtgtctctccccaaatttcccactcttataaggacaccagtcattttgatttagggccacacttatgatctcatttttacttgattacctctgtaaagaccctttcttcaaataaggtcacattctgagatgccaggaaggcggtcaggacttcaatggatgaattttagagggatgcaattcaacccatattagggagccaacagcactcccgcgaactgagcccacatggcatttcaggcatgtgatggggaccatgagtataagagctaagaaagtaagccccggagactgcctgggttcaaatctcagctctgtcatttcccagccatgtaacccttcagaggcttagcttcctcatctgaaaaatggggcaggtaagagaatctcttaccataggtttgtggtgaggcttaaatgaataaatacctgtaaaacacttagaagatgcctatacatggttagctattactattattactgttattgtcccctcgtactacagattatagtagtccatttttccctctgttgagtaggaaaatgactttgcccctaagtcacccttcgtcaacagaatatgataaatcacacaaattgtagcttctctcactgagtggtataatgcttttttatttttaacagaaatggtgcaatttagactttaaaaaatcatttaggaacctttatccgatatttcagtgaaattttttggcagcctttaataaactgacgtgagaatctcagtgactagtgacaaatattcatggtgacatagctaattaaggagtcagatgtcttaccaaaactcataagcattatattttcttctcctaagcctttccagctaactgtcttacttttagtctgtatccaacaagcagggacagcttttttttttaaattgtagcaatgtacttgtgagatttaccattttgaccctttttaagtgtatagttcagtggcattaagtgcatccacactgttgtgcaactggcaccaccatctatctcgaggatttttttcatcttcccaagctgggattccatgcccattaaatactaactttccctgtatccttaccccctggtcaccacagttccactttctgtctctatgattttgattactcctggtacctcatctaagtagaatcatacagtatttgtctttttgccactggcttatttcacttagcatagtgtcttcaaggtttatccatgttgtagcatgtgtcagaatttccttcctttttaatattgggtaatattccattgtatgtataaataatattttgtttatccattcatctgtcaatggacatttgggttgcttccaccttttggctattgtggataatgctgctatgaacatgggtatatggacttttttgaaaaaaagttgtgattaaacatgtacatgtatattgtagaaaaattaaatatataggcaagtagaaagcaccctcccttcccaatagagatatccactgtgtatattttggcttctttccctgtaactatatttttgcctatacttgtgaaatgagatcattctatacatattcttatggaaactgagccattggtaaagaaatgtttgaaatagatcaagtgatttggtagtttccttccttgagccccagggtggtgggtgcctgtgctgtaccaggctggcctggtactgtgaaggtaaggctggccttatctcctctatggctcctgtatgatcaggacagtgttccccaatggaagtaggggaaatgggctgtgagaagcccaaggtcatctggctctttctgccccaaatgctgactcctaactggcctctcctttccctctcttctaggcaaatgtttgcagactacggctgaccgtacctcctgagagtccagttcctgagcaatgtgaaaagaagattgagagaaaagagcaggtaaggtatctccgaggcaaagccccaacaagttccagcctctatacccttaacccactctcccatctcctaaccaggccattcccagaggctgggtgtctgcacctctgttgaggagaaggccctctcaaccttcccacctcatctcccgtcttcccagaagacagagagctctccctagccggctctgccaccgacgtgccctgctcttgtttcttggtgaacactatggctttgtgttaccttgaagctgcagggacactggtcttagtgacaggtgctgtggcggggaacgtgggttttcctgaaacagcccaatccagttgcttcaaagggcctattgtgagcagctggcggggctggaacctttctcagcagcttggagcagcagccgggggctctgctcccgcagaagagaggaaaggctggcaggcaggctggtgcagggaaagggcactttcttggctgggggtaggaggcattcggcaaacatttttgtgacagctcctgtgctaagtgctgaggccgtgaagataagtatgtccttgccttgggggaatttgcagttttctgggtgagacgatgatgtgatatttcaggtgttaagatccagccctatatgacggaatctgggaacacagagaagggaataactgactgcttgggaggtgacagtgaagttggaggcttgaaggataaagaggaggtcctgctgacctctaggcctgtggtcctggccgacccattttactcattcataattatggggcacctactgtattccaggcactgttgtatacagtgggaatatagtagggaacaaagcagtaaaccaaatctgtcatccatggaacttatattctagtgggacaagaatggaagtaaacaaaataattaagtacattttatagaggttaggaggtggtaagtgctgatggagacaaagtaaaagaaggggtaggggtgccaggaagtaggcagtactttttcttgagcatgtattttatatgattataaagtaaaacaaaataaaatgatataaatttcataaatggagtcataacatagtgacctcttgaaatacaagcttgctttagagttaaccactaatgtggtcaactataaaaaagaaagcttctcatcgatggctaagtgtttgataatgtccctaagtttaccataggtctctgtctctccttgccctctcctccccactttctaccaaggacagagagctgcctgtgctgatgcaaatgatgaatgccagggaaaggaagtagggagaaaagcaaatgaagttctgactagagaaaggtgaggagtaaaattgctgatctgcctaaaaagagtggatgagttccactaaaaagatccagaaaaacagctagttctgggttgcagaagggaaaagatgagggggatatgggacctctggaaaataaggtttcactcagagatgaatggggtcctagtaaaggacctagcagccagtttgaatgggctttcactggccaaaatgggaacagctggagcatcaaaaagaataatgacagtcatggcttataacacatcgaatattaaaaaaaatccatacgtttgtagtgataattggagaaggggagtagaggcacgagatcagaggataaaatagggaaggctcccttttttttatagaacactagctaataagtttagaaaatctttgttttgtaacctccaggtatactcatcaatagatgcaaaaataagttggtgaaagattattgtaggatattctcaaagtatcaccccagcggattactgattctaaagggacagtaccttcacagtggagtaggcaggcagccagcatttcaaccaagtgatccaacctaacttcaccaatagtggaacgagctgatgttacatgacttctgaggtgattcacctaagaggtgcacatcacatatgtaatattcatgccaaacttgtttaactgaatctaataataaggaaacagaaaaccaaaatgtgggacattctgcaaaacaattggcctgaatccttcaataaattcaatgttatttttaaaaaagatgagaatttgttgcagataagagactaaagagacataacattaaatgtaatgagtgaacctggattagatggtggcaaaaaaaattatataaaagatagagcacatggacgcaggaaggggaacgtcacactctgggggactattgtgggatggggggaggggggagggatagcattaggagatatacctaatgctaaatgacgaattaatgggtgcagcgcaccagcatggcacatgtatacatatgtaactaacctgcacattgtgcacatgtaccctaaaacttaaagtataataataataaaataaaataaaagatatactgggatgactatacaattttgtatatgaactatatattacatattattgaataaatgttaattttcttgtgatgatggtactatggttatgtagttgagtggctctttcagcttctgtgtagctttgaacattctccacagacaaagtttgggagtaaaagtcctaagcagagagtggaagtggtcaggcttcagctgctacacccctgctgatgagcaggattgagtggggccatctgtcactagggagtgtccccttctgtcctcactgctcctctccctgcctgtcccttttagagctaatggcttggtccaagacatgggtctgggctgtgtccaggtgctcagagctgcttagaacactttttgaagaagtggcctaagctggagtgagggacaggacaagggcctggtggcagtacctgttggtacagacggtagaggaattggggaatatagtcttttggagttagacccaagcttcatgccttgggagatgttcgtgaaaggtttctgagtgccaaaactggggtggtaggggctggaggaccctggagggtctgtaaccactgaagaagaatcaagtaatcccaaggaaggagcctcgtgtgtttagctgtgtcaactggagtcaacaaattgtgtgtcagtttgcctatttggcttgaatagtgcttttcaaacttgtcaataggaccctcttttttaaaaaaaaatcagaatgttttactgagccctcatatgcaaaccaagcaaaagtggtactaacgggggcccaagtcctcccagtctccctttacccctcagcccccagacaccctcctgtggttgcttgagaactccaaggccctgaggagcacaggacaggcactgctgggatagcatatgcaccaggatacttcttacaccaggtggaccaggcgtgcagtctaagtgcctatgtgtggcacattggtgactcactgcagaagaactggggtagaggggaggagggtggggctgttgtttccctagggatgaagtccttgggtggtggcagcccttgaagtttctaggggtaactgggaggctgctctgagtgatttcgtcaccatgtcctggccaggttcctggcatgagtcactgagggccagggccatgcactgtcggggagactctgtaggggccacttccttggatgtggtttcaacatggcttcccctccttggaacccatggaattgcaagaggccaaaactctggatgaccctccctggtcacgtaactttggttcctttgaaggggcttcttctgtgtgcaaaggccaggggattggagctggctcagatatgtgagtagaaagttgtaaatggcccgattgacttctgttgcagtgagacttctcaaggatttccagggccctgttagagccgcacatgatgagggcagcctgggccttccttagtctttcacactgttctgggaggtgtttaatattgcggggatgccacgatgccatgggacagctggccatgcatagaggctgctgccagttgggccattcttccgtttgctgttctccagttattggagaaaggaattgctcccaatgtgggtgtgttgtggatggcgtattttgcccatttccacaaaggtgtgtttggaggctgctggatgcaattacaacagagtcagcaccttcttatggagtcaagggtttgtggggtgtatttggaggtttcctatccctaaggcagatgccctggctgcctgttccttttagtccttcaggagacatcaactgccccgacactgctttatgctgaccacagatgagctcccaaatgcacagcttcctcatctttaaagtagacacaacaatgcctggtttcaaattgtaaataagctaatatatgcaaaatgcccaccacagtgtccggtttataatatggattaaagaggtaatgactaaacactgaatctcttccctttgaatgccaaagccagtggccctgggtctttgtttttacccccttagaccttctggagttattctcctgcctgaagctgcctgtctttattttccaaacacatagcatctcttccttcctcataacccttgctgaggccctagccatgcttggagtcccttcactgccatgtctcagtttatctaagtcttccctgtccttgaaggctcagctaaaggcccacttcctttctgataacttcccagacttctatgtgctggggtggtcactcttcccttaacctacaggacacccaggctgcccctttcacttggcacctagccacgtgctgctaagaactccacataggtatagatatatatttttgcaaaatttgtatataacatgtatgtaggcacatacacacacacagagaaatgaggttgagtctttttattctctcttcccaaagcctaggtggctgccttgcacatagtaggtgcttaatgaatgcttattgattatgatgattgagttttatattagcttcctagggctgccacagcaaagcatgaaaaacgagatggcttcaataaccgaaagtattctgtcacggttctggagttcatatgtctgggatcaaggtgctggtggtgcctcctctgaaggctccagggggagaatttttctttgccgcttccagctgctggtagctcttggtaatccttgccttgtggcagcatcgctctgattttcacatggcattttcatgtgtctgtgtccagattttcccctttttatagggacaccaatagggcccagtctgatggctttctcttaacttgacctgctctccatataattcctaggtactggaggttaggactccagcatatctttttgggggacactcttcaacccataacaggttctttgaggaaatcaccttgaattatagtaacaactcagatgaattagctgtgggcttttatttgaatattgaacattaaaaatcattaataatatgggagggaggatgctgattagtttgtgggcacaaattacatgttgagaaattgataaatgtagaatataatgtttataaacaggctgaacattcaaattaaaattggtaatagttttgaaattaagtacctgttgttttcaaagaactctctgaatttatgtatccatattcttatccatagtcatgtgcaacagattcctatgtgtatatgcagggacacacacacacagacagaacccacaccagctattgcagacttagcatattgaatcagggcctcactgcacagttgaattttagggcatctgatctgagttgattctgcgtctttatgatggtaaagtcctttgcaaatagataaaatagcttgaggcagataccgttttaaatagctattaacatcccagctttggaggtgtccttcagtgacctgttgtttttaaagaagctgttttctctctagatctttgagaatgctgagtgagagagagagcagatgcgtgggtatggatgtagagttgggaactttcataacccaataaaatgttgaaaaggaggaagtccttgccagtaggttttatagtcctctttcctttaaaagccttggatgaataagcctgctgagttctcgtccttggcgtgactgtttatacaacctcgcgggctgttgccaagtgagcgagtgtgctgccatgattcagagcttcaggtgggggccgggctgccctttgtgacagcacaccagggactctgcgtgcccctcagagataacagcccctggaggatggggagagacctagagtttgagtcccggcttcctcatgaacccctgtggtggttgggccagtcaggtcatctctaggggtctttgctgcttcttctagcaaatagaaatgttagtctagagccagtgtttttccaaacattcctttattcacgttgataaatgtggaagttctattggtaaagcagtcaaggtgcagcgggtggagctgaaataagatcagggctatgttggctgcctccatcaggcccccaactcttcaccctacaaccttgtcagacacggaggaggagctgggaatagtgtctgaaaacccactggactatacaactcttttccatttttctaaccttctgagactttgtgattcactacccatgaagagaaaccaaggccactttgggggtgaatatttcgctgtcagagccactttgacaactgtaatgagaacagcaaaaagaccaagaagaaggtggacggacagacagactcattcagatagacatgtagagttgagtaggaacccatatactcaaaaatgtaaagaaaccacaccaccaatactagaaactcccagtatctactagtatgctattagcacactaggtgttttgtgtgttttattctgtgtattctttagactgcccactgaaattggtggtatgatccccattttagtgttaaggaccctgaagctctttaaagtacagaaaataactttcttaggggcacacagctagtagatagtggatttgcaattccaactcaggtctgtgacgggccatgttgccatgggaacattgacttgcgtgccttctcctatcagagaaactctgtttaggatatttacattttatcagtcaaggttaccgaaggtgtgtactatacccctgggttccagaaaagcagttcctgatttttttttctcccgtgtattcttcccttttccgcgggggttattaggcctaagcaactattgtctgcgttgaagctgtgtactagctgcacactagtctgcatggaagctgtgcactagcggtacgctagcactcctatcaggctgctatcattacaaatgccactctctttgggacttctgcttggctagaagctttccttttccttctcatcttaagctttgaaaatgatcttttctcctgagtttacttaggaaatgggcactattcagtctgtgagactgtcagaaataactaaattagttttattttttagaaacagggtctcactatgtcatccaggctggaaagcagtggctattcccaggtgcaatcatagcacacgattgccttgaacacctgggctcaagtattcctcctgtctcagcctctcaagtagctgggactacaggcatacaccactgcgcctggccaagtattttgataagccagaggtttcagtttttctgagaatatttatttcccaggctgtggaaaggccctttgggctcagaggtaatgttcatttttgtccaagaaagcaaaacagtgttaagtatgagtaatgacctgggccaaataatttgctgagatagatacacaggttgtacaagccagagcacattcccgaagtgccagcctctgcctgcaagatgggcagggaacccagtggctctgtgctcagcagtcccaggttagctgctgccctctggctggagaaaagaggtctgaagtaagaagttttggaaataacttggcttccagtctggaagtcacacgagtcacattatggcccttctcaaccatattggcagccaggatgtgtgaccagctgcccctcctggctggtggggcgggggactggctgtgttagtctgctattgtcagtttgatgcatgttgagctgcatttctgctcttatttcccctaagaatgctgattgaccaagggattttctttttttgcacagattaatcctcagtgtcaaggatgactgtatactccaaatattccatctttctttttcccttcaaaatgtatttatggagcatctatttatgctgggtaccagagatagagcagtgaataaggcagatgttgtccctggctttttggagcttgttgcattgtaggatcctatcttctcatttaagatttggacaatatcattggccttgttaacgcagactcttcaatggccagtaaatcccttaggagaggaatttaggctgagttagttttctgtagctgctctttctttctaaggcactggctgccagatgtatctttagggaggtcagccatagtatggggcctgtaggtagaatttatgctgtgagtactcacaggaaacagcttaatccagagattctgcgtatgtgttgggagtatggaatgccctttcagttaattttccttctttcctactttctttttattctacactttaattaagccttttattttctttttttttccgagacggagtctcgctctgtcgcccaggctggagtgcaatggtgcgatctcggctcactgcaagctccacctcccgggttcacaccattctcctgcctcagcctcccaagtagctgggactacaggcgcctgccaccacgcctggctaatttttttgtatttttattagagatggggtttcaccgtgttagccaggatggtctccatctcctgaccttgtgatccacctgcctcggcctcccaaagtgctgggattacaggcatgagccaccattcctggccaggccttttattttcaagcaaattctgtctagtattgtttcatgcccaggaggcttttaatagagtacattttttaaaatttgtttttttagtaccaagtagcattataaagaggcttttgatttttaatttaaatttaatttaatttaattttcttgagatagggtctttctctgtcgcccaggctggagtatagtagtatgatcacagcttactgtagcctcaacctcctgggctcaagcaatcttcccaccttagcctcccaagaagctgggactacaggcacacaccaccacatcaagctaatttttgcattttttgcagagatggatttttaccatgttgcccaggctggtctcaaatgcttggactcaagcaatctgcctgccttggcctcccaaagtgctgggattataagcatgagacaccgtgcctggccataaggaggttttaaaaaacttaattttggagagtttcaaacatacaaaatgagactggatcatgtaatgagtcattgatcctctctccagcaccagcaacctcaatacatggccaatcctgcctcatctacatccacgctgtataaggaaataaatatacatcatctgtatctcagcatgtttctctaaaagagactgtttcttaatatcatcataatgctcttctgcctaaaaatcaatacttttcttattgggaggtattttaaaggatacaagaggagagaaatttagccacaaacatcttgctcaacatatcagcttttttctttttttccccgtgttcagtttttgaccaaaagcatactgatattttataaaaatgatagccatctatgctcctagcagcttttctgggtatacatgttgtgaccggggtaaacattaactgtctgttcctccatctaagaagaataacaggtattcacttcatttggaccatatttatgtaccctgagtaattcccagacctctcccaacttctaaagttccctattcattcagcaagtatttattgagagactcattgcacgtcagtcactgttagatctgggaattacggtggaaaagaagacaaagtaggccctggacttgctgcaatttacagttgatagggaagcagggcttccccacacaaggatactgacatacaccaacagtcgctgggctgcagctgtggtgagtgtcgtggggaagtgctgtgagagtgaaccgagaagacctcaggggtctgaagggtcaggaaaggcgttcttgattcttgaggaagtgacatttcagcccagcagtgcagatcgagggaacagcatgtgtgactaccttgaaacaagaaggaggctggctcctaaaggaacagaagggaggcagtgaggcaggtgtggggttggggatgggcaggggaagtggaaagagccccccatcctgggcctgcctcttccaaatggccctgggacctgagagcaggctcttgggttcctacggctggagaccctgggatgctacatggagacgtgagttccagttgttctcctgactgtagcattgtagtgaaaaaagaactccaatttggaaagacataggcaggcacttgcaggctgttaccctggaagaagagaagtcatactatttacacagtagggtcattgtgaggattaaagaaaatatatattttattatatattatatgtaataaaatcacctgacaacaaatttcttccccctcctctttcttcagtaactttcttcttcacttttcctgtcagggaccatcagctccttgggctgcctcaggagtcctctcccctggtgtggctggtgctgatggccctgctccccagcgggtagagtcctggggccgtgcccttcctgggggcgttttatttagaccctgacatttacacaaatgttcaattcaaacataatgcttttttctttttgccaaaaaacattcaaagtctacaaaagaacataaaggaaaaagtgaaatctcattttcctgaggaaactgtcgttagagagctggattgcatccttctagatgttttacatacacaaacacacagtcttcaaacaaaaaatgaaaatttgaaatttatgatttttcactcagtgtatcttgatctctttctgtgtgtacaactttgagacctgggccactcgggagtgttccacagacttcattgttcctggcattgcttgtgttttccctgctccgtggcggcttcatctccctgcttgggccaggggcaggatcctctgtgtccggccacctgagttttcctgcaagccagtccacctctgaaagcctttgctttgcagaaatgcatttcaccaaagccttgtgttgtcattggcttgttttttaggaactgggtggagtctgtgactgaaagatcttgcttttgtttcctggtatttggggagtttcattagagcttttcctcttcctggttatatgtccagtaaattggggataagttaatgccagctcttgactctgctgcaagccatttaacagctcagttacccaaacttaagcacaaatgtaaggatagcatcagtgcctttggggcccagctgtaagggactcagggggaagcatttaccagaaacaagtacaaggaatcacagcttcttgcatcccatctcttcccaagtgtgggaagaagggcaagaagcaatggttgtagtattttcttactttttaaaaagattacattgaaacgaagcaaaacaaaacaaaaaacaagcaatatagaaaggtataaagaacaaggcaaaagtcaccctgatctctagcgcccctaccccatccatggttccttccttagagacctgtaagtttaatcatcatcacatagttttctagacctttctttgattttgcaaactttgaatgaatgggatcataaagtacttaaagtacataaagaacttactgttctgccacaatgaatgattttcaaatgcaaattaaagttttgtgtgttaaaaaatgctttgtgggccaggcaaggtggctcatgcttgtaatcccagcactttgggaggccaaagcaggcagatcacttgaggtcaggaatttgagaccagatggtgaaaccttgtctgtactaaaaatacaaaaattggctgggcgcagtggctcacgcctgtgatcccagcactttggggggccgaggtgggcggatcacaaggtcaagagctcgagaccatcctggccaacatgatgaaaccccgtctctactgaaaatacaaaaattagttgggcgtggtggcgcgcttctagtcccagctactcaggaggctgaggtaggagaattggttgaacccaggaggcggaggttgcagtgagccaagattgcgccgctgctctccaacctggcgagagagtgagactctgtctcaaaaacaaacaaacaaaatacaaaaatgagcccatgtggtggtatacacttgtaattccagctgacttggaagactgaggcaggagaatcacttgaaccagggaggtggaggttgcagtgagccacgatcacgccactacactgcagcctgggtgacagagtgagactccatctaaaaaaaaaagtgctttttttttttttttttttttttttgtgaatacatggcaagaatctctgtgtaaaggcagttgaaaagttagcaggacagcagaattacctttatggaatttgggtttctgtgctgtgggattgtcgaggtacctgggtcagccctagggaaaactgagagaaggtcagtttgtctgaagtctcagtccttgatcttggattttttcttacttctgtcccttccatgttgtggaggcacctactctgtccccctgcatctaaacatagcctgcagtatggggaggtgcttaatgtcagacagaatcacagagccaggcttgaatgtaggtgtgtgtccataagcaagttgcctaacgtctctgaacttcagttttctcagctatgaagtggaaaggacagaaaggacaattgctgtgtcatagagtggttgtgaacattaaatgtgattaggaatatttctagcctatagtaggttttcaacaaatcttaatttccccctttcctgcttgttaagccttcattctataaaggcgtgttaaggcttggacatgttactgtttctcaagggtatttgcatttcaacaatgaccaaaactttaactgaaggaattaagaaccagccaacaggactgggaggatccttttgggctgaagtcacaccacctcttcctggcttttcagaaatatttcatgaatggtcacaacaggttatgtactaacactacccccttttcttagaacttggccccaggaccagccctaccctcagaggacagtttggctgctagatgactgccagcctcaaccttgtgcattgtatttagtgatgaggttgaagtcatatggagaagctgggataaggggaaagacagcattattaagagcatgaggtttcaaatgcttgctcttcttactaggacaacgcaagtccgtctggtatctttgtgggaattactcttaggtgagtggacaggcccttatatacattagcaaacggtgctcttcctccggggtaaaagcagcccaagcctatgccaaatcaccttggtgaacagagactagatgggatttttgctccctccatctccactgccaggcaatgagtgctgggcacaatttgcataatcatacacagtgggcccgttattacaactgtgcatgaggcctaaagagtcattattctttttttcttttcctactttcttttagcttcttgacctgagcaatggagaacctaccaggaaacttcctcagggtgttgtttatggtgtggtgcgaagatcagatcaaaatcagcagaaagaaatggtggtgtatgggtggtccaccagtcagctgaaagaagagatgaactacatcaaagatgtgagccatttaagagtttttgccccccacctgtattctttttgtagcatgcaagagaatggagttggaagcattgaagtgaatgtaataaggcattttgaaagaattcttagtgttatcattttggctggaaatgtttctgtgtatcttcatggtaatgttaaagtacagatgtaaatctgcaaggaaggaaaggttgagcttctgctggatggatgttactaggtaagtatactcaggagagcagatggcttcctccttccgtgtagggtttggaggctcttgagtggtttttctttattgcacttaccagtcccacattcatccctggcaagaggaataggaagactgtgggtgattcagatcaatcagttgggttgaaacaaatgctaggaagtcaaccacaatagactttgtccaaccaagccaatcaatgccatttccttgtatttagtagtttatttcctatcttttaagttacatgttcttttgagaaaatttgggaaatataaacatgtatgaagaagaaaataaaatcactcataatctcactattcatccagagcaattgttaacattttggagtattttcttcttctctctctctccatttcttttcattccatcctgtgttcccctagattgactgattcccctcttgaccaaaccacccagcttatatggaagaggagatggcctgctctgacactgatgggctcacattacagaccagtggcttagaaagtgcttgtaagaggcagtgtaggggcagggagtcaacctaggcctgtgagctcacagaccttgcttcgagctccagctctgtgtctggcccagcaagtcacttttgctctgtgcaggcttcagtcctcatgttgagattgtgggggttggctgggctttgatacctaaggttaaaaacacagctttgtgagccccattttattttgtgggttttcagataagatgcaaactcatgatgtcttcgcttttgtgtgagtttttaaaaggaacatttcttgttgaatttaaaaaataataaatgcttagcagaaaatatgaggaaaagccagcaaaattagcacgcatatacataatgtatatgacagccaccaaccttaaactcctagttatcccacctttcaaacataattttaaaaatttattttattgtatattttcgagacagcgtctcactctgtcatccaggctggagtgcagtggcacaatcacagctcactgtggcgacacaatcacagcttattgcagcttctacttccccaccctcaagtgatcctcctgcctcagcttcccaagcagctgggactgcaggtgcgcaccgctacacccagataattttttgtagagacccagactggtctcaaactcctggacttaagtgaacctcccacctcagtttcccaaagttctgggattacaggtgtaaatcactgtgcccggcctccagacataatttttaaccattcagaatattcaattcctgaatttcctgttaagaatagctcagacattttaattttcttgtatttttttctcaaggaaatacatagaccttcctcacttaaatgctccggaggtatggctcctcccttagtaaccttctaaacagagtccagagtcccacattgcccaagacaaaggcaggaggagatgttggctaatcctgagctgtggatgacatgtaccaaagacatgtgccaaagacctggaattaccaccctccactgtgatccgcaacttaaaactaactttcaggtccctcctgccataggtggcttcagttccatccctggcctggtcattgcagtatttgcctttgggagggacatgcagctcaagattccacccactcaccactgggagcagcacaagagccagctcagggccacacatgaaagccgttctgcctgcctagaatgaaaagttgtacctttaacctcattttcccaaaatgtttgtacttcatggcaagaaagtagactctatttttagaattcatgtggggaagtctgggggtcttgactctcccttcccccaaatctccaccaatatccagtaacccctaataaacatgctgtctattttaaaacaatgtgcttcaaaattaagccttccaatactatgtcctaaacacttacattctaaccaaactgctatctttaggcccttcctaaaacagaaattctggagtgtgctggagaaaactcccttgagacttcctgccctatttgagggttcctgagtactttccccatcctagggataccagaagaagggaggagacagggactgtttgtaaggtcttttgttgtgttttgaaagtttttaaggtcctgctagccctctgaaagtagtactgtagagaaacttgaacagcgtttgtgtaaacaagtgtttttgggatcacttgaacttttgttatatttactgccttgcgtgttattggtgattactgaggaactgactttcaaatttatgggctccccagggttcatattttacttccttccattccagatatttgattgctctttggcagtcagggccgatagagggaaaattagaggttgctttttggtttctttggtcctcttagccatgagtctgttaaaacacattctacttgtaaaaacatgtgatgggaaaagggcaaaactttgcccaactgtcatttgagggtgataggtgaatttcaacaaaccattttttcttcagagtttatttggctaattaatatttattatgatagttacatgtaattatatataattttatgtaattaatatatattagcatatatttgatatattctatattaatatatgcctatatattttattatgtatataaaatatatacataataaaattatatatatataaattatttggataattcctaactagtttctaactagttgttgggggtgaccttctcccttaatttcctgtcttgttcttaagtttatttttatgtggggtccttctttctttttcttttttttttttttttgttttttgagatggagtcttgctctgtcacccaggctggagtgcagtggcatgatctcggctcactgcaagctccgcctgccggattcacgtaattcttctgcctcagcctcccgagtagctgggactacaggtgcccaccaccacaccccccaactaatttttgtatttttagtagagacggggtttcaccatgtcagccagggtggtctcgatctcctgaccttgtgatccgcctgcctcggcctcccaaagtgctgggattacaggcttgagccaccgcacctggccggggtccttctttctttagagtttcttaaaagttttagaaatcttgtatgaaaatgttatggcttgatctctaactagtatctttgtgggctacaggtgagagccactttggaaaaggtgagaaagcgaatgtatggagactatgatgagatgagacagaagattcgacagctcacccaggaactatcagtaagtcattatctcagttgcttggagatagggaggcatggcaggctcagagtggtccctcagtggctagtgcctaaagatattagagtatctagtgttctttatcaatagaattacattttaaataaactgagaaaattttatcacagaatgaaatttattacctaaagggaaatttttatggtaagaataatcgtattcatattcaaagcattctcaccaaagtcaggagcaaaacaaggaagccagctatcactattattatttaacattgttcttcacatactggccaaacaagagaaataaacatataggtttaaacatggcataggtagatgtaaaactatcactgtttacaaactatatgattgtatacctggaaagctcaagtgaacatgaaatgatgaaagaaaaactactacaaacaagtaaagaatttgttatttgtagcagggtataaaattttatacacacacacacagaggatataaaattaatatataatatacaaagaggtttcaatatacaaaaaattcccaaaatatcatcaacagaaaaatactacatacctaggagtcaactataataagtggaaagaaacaccatgtgcttagaaaggaagattcagcatcataagatccacattactgtaccattttaatatgacccaataaaaagaccaacaggttttgttttttataagtggagtaggtgattctaaggtttatatagaaaataaataaaaagattgggaaaataatgggaaaaaagagcaacgagagggagtagccttattaaatgttaaaagaaagtgaaaaagcctcagagattgaaacagtatcatagtggcacataaatagacaaacatcaataaaaagtactccagaaatgtacccctgtatatgataaatgtagcatctcaaaaaaggaaggaaaatggactagtcaatatgtgctattgggaaaacttatgtgctgttggaagtcttatacctggctaaattcctaaagtatcaaagatttaaatgtgaaaaataaaacccaaaagtgccagaagaaaaatatgtgtgaattcatttatacccttgaggtaagggaatgccttttcttattatgatataaaatcccaaaaccatgaaaagaaaggctgataactttgacaactttgaaatgagaaactcctgctggtaaaaatgtcaaagtcaaatgaccgggaaaaattatttgtccttcgtatcacacataataggctcattttctgaatattgaaagatcccccacgaatcaagaagaaaaaagctacaactcataaaaataggtgaaagatttgtaacaggtaatgtatactaaaggaaagatggagagagctcttttgtgtatgacaggatgctctgcctcacctcatcgtaagataaatgcgggttaaaaccatcccatgatataatttttatctattagacccgccaaagtgcaagagtgggtcaggacattgttcacaggcctgtgggcaaagaagagggttgctgatgaaaatgcaatttgctattactcttacagagaacaattcagcattatcgatcaaaattacagatgtttagatcctttgacccagcaattctattcctagcatttattctacaggtagactctcacatatgaggaaagacataaggatagatttatttattgtagcattgtttgtaatagtaaaacaattggaaacctaaatgtctatcaagtagaggaaagtggacaggcacggtggctcacgcttatgatcacagcattttgggaggccgaggcaggtggatcatttgaggtcaggagttcgagaccagcctggccaatgtggtgaaaccctgtctctactaaaaatacaaaaattagccgggcatggtggtgcaggcctgtaatcctagctactccgttggctgaggcaggagaatcacttgagcctgggaggtggaggttgcagtgagccaagactgtgccactgcactccagtctgggtgacagagtgagaccctgtttcaaaaaaaaaaaataagggaaagtaagataaacgatgtatctctacaatagaatatatgcagttgtaaattaaaaaaaaaaaaaagaaaaagcaagtaatcccttgaaggggagatacagaaagatgtagacggtgaaaaaaagcaagatgcaagaaaatatgtaggaaaaaattgctaccatttgtatagaacaggaagagaagataaacatatcaggattgttctgtgtgtgcacaaaaagttactaaaaggttaatccagaaagtaactaacaactgtttctaattgggaggcagggtggtaactgagcagggtggtaattttttataaaaatataaaagtaactttatacttttgaaatgtttgcaccatgtgagtgtattacctactgaaaaatttaagaaaaataaccttcttctagtttagccaagctaatgcttgtagacatttaaaaaaatttattattaatattcccaaagataaaagtccctgtctatgtgacgtaccttccataagagttaatatctgtgggaaagaagggcagttacaacagtcatgcatcagagttcaatttatggctgggctgtgagattaagtgcttaagtaacacctagtaccttgattataggagtggggctacgtaaatatatctccctaccccatttcttgattataggagtggggctatgtaaatttatctacctagccccttccttgattataggaatggggctgtataaacatatctacccagcccattcccactggcatgtgggaggacatttgtgaaattctcacctgcttatggaaagtcattctgccatgactgtcagacaccaatgactgtcatcaaagccaaagaattggatttgcaatagatgcataaacaagactctgctcctcgctttccatcaccatctcctacacaccctcattttctcatgctagaattgtcccagaaaccctgtctctctgcctactggtctcctccttctccaagtcatcctacctactgcagccagattaagattgctaaattattgctattgaaacacactgctgaacacaaagctgccacatgctcctgggcctggcttgctgcttcaattctgtctccactccccagagtgcacctcctgctctgctgtgccggggctgctttctgctgctcccagaggccacatggggggccttccaccctcagtcctaactgtatctagcctcttaccaatatctaggtcaagaatggcttctgactcagacatgttaaacacacacacccaacaaagacagcagcaacaacagcagcaacaaaacaactctttttttttttttttaaatgagacggagtttcgctgttgtcacccaggctggagtgcaatggcgccatctcagctcactgcaaccttggctcactgcaacctcagcctccggggttcaagcgattcgcctgcctcagccttccacgaagctgggattacaagcgtgcgtcaccatgcctggctaatttttgtatttttagtagagatggagtttcaccacgttggccaggctggtctcgaactcttgacctcaggtgatccgaccgcctcggcctcccacagtgctgggattacaaaaacactcttgagaattgagtgagaccaaagcatattctctccatggtgactacaaagaacaaggtggctgcagaagttatttcaactgggttctagttctaggagcgccacttctgagctgtttgacagtgagcaaatcacataacttctctgattgttttcttccttacaaaggacaacattctgactcctgcacagtgttgttgagagggctaaatgagggtctgtgagtaaacactatccaaaggaaggtgattcttgcccttctctctggatcatgcagatgttgacttttaatttaaagctttactttagatattgttgaagtagatgtggcttctaacagaagaaagttccagcctaactgaagattgtcgtgaacgtgtagggattgattttgtgtgactgtctcctcgatctgtccaggtttcccatgctcagcaggagtatctggagaatcacatccaaacccagtcgtctgccctggatcgttttaatgccatgaactcagccttggcatcagattccattggcctgcaagtactcatctgcttactgctatgacagggcaacccagcttaatcaagagtggggactgtgcctttgcagaaaaataagtcacagaacatccttagctcatgattcagaattctttaagcagaaccactgtgaagactgtgcccagaagacagtgtaggaaactgaaggaagcatttccaagctgagactctaaggctttgtttttgctctctgaaaaggaaatttagaccccgagtttagtgtgagagatgttgcttgcttcaccagatacccgagtggtcctcagcatcagtgcctaaccccacacgtcagccctcttcctccagtcccagtgccacaggaagtgccacctaatcacagaataacacagacttcactaaggacaatctgtactccttcatggcaagcaatataaaaaaggcctgtaaacacttttttataattagaaattattttgtatcagaaagaatcatggatattccacgtcttgtagtagcagacagggaaacagaaagacccggtatcttatatttgtgaaaatgcatgttgttatctcactttgaggcattgttttcttggttgatttggtttacaggagctaacccttcaagtgcttcccattcttactcttacaagtcccctaacatgcaaattaatttgaaaatgttcaaagcaaagcattgtatgtatttgaaatagcttcccttggtcttcatttccaaatgtatgaacaacagtttttacctctcctccaaatttatttggctcttatctttttatcctcctctcaaaagttccaaaacctatttcaaatcctttctggttctatataagtaattttagataaataaattttcatgttgggattctccacttcccctaattctctgataacagttggtatggcagcagtgacaacagcagggctcggccactgtcctggagtgggtctgggtggcctcgtgtttggggtcatctgcgatgcccatttctggtggggcttctgagtcccacccttttcctggctctcttgagtgtatgccagctttcccctggcctcaggccaagccccactgggtctggtttgctcagcagcctttgttttcccttcctcctgtggtcgggggggcttgccaaggctccctttcctcccctttcggacgctgtctcattcccagcccaccagcaagggctttatctcacctgagttcagacttagtcggtatttgtactacatctctggtttttcttcccagaaagaaaaatatatttgccagtattttctggcaattcttgtgctttgccatctggccaacactctggcatttactgcagaggtcagctgtttgagctgggccagctctgacccaggcaccttgactgattcctagttatcatgcaggctcttagtcctggacagccaaaggagccttatagctaaaaccgctgagagaaacagaaagagagagacaaagagagagggagagggagggggagggggagggggaggggaggggaagggggaggaggaggaggaggagaaggagaaggagaagccatctcacagcaggaaactcaacctggtagaggaagagggctgatgcacggtgttaggcactgatgctgaggaccactcgagtacctggtggaccgagtctgaagagagctggcttcttccttatgcaagaccccagcctcttccactggcccactctgtccactttcattattattgacagggagaccagacccttggtttgattccatagaatgtcagagctagaaagaactgagaggatctcagttttatgaatagacaaactgaggccgacagagagaaatgacatgagcaagatgcctacctagtgacagagccaggattagaaaaatcctggtctcttggaccagagtgtaggtttttgtgtggatacacgagtagaatctgtgaagccagtggggctgggggagtgggtggctggtctaggtggtttctaaagccccttgaagctcaaatgttctgtgactccatgcttccaaatagcttcagtattttctttagtatctaatcacctccttcagaaattctttttcttgattcaagtaggtttaggagtgaaaggcttatattgtccaaagtagaggctgaggaattgaggaagcttcagagactgatcatctagacaagagcacagaggtgttagaaacagtgcccaacaccagggttttcacatcttctaatgtgaaattgtagatgactggggacacagtagaagatgactttccaacggcacagattctgtggaggccatttatctctaaggagagttaaccaagtagaaaccaaagcagtaaatagcaccaccatttttttctttttcttttttattatttttttagagatggggtcttgctctgttgcgcaggctggagtgcagcagtgtgatatagttcactgcagccttgacctcctaggctcaagtgatcctcatgcctcagcctcctgggtagctggggctacaggtacacacaaccatgtctagctggtttttaaattttttttgtagttgcccaggctagtcttgaactccaggctcaggtgctcctcccacctcagcctcccaaagtgctgggattacagtcatgagccatcacgcatggccaacactattgatttaaacatccttgcttcagtgcggcctggagcaaaaattacttgtgcggcttggagcaaaaatcacttgtctgcattaccaaattctgttccttagtacttctttattactacccttctctgcctaagggaggaaggtgaaatgtttgcaggtatgtgagtattctcagtcacattgtcactatcctggcaggcagtctagaagcgcagaagggatagctcttttaagaaaaaagggaggccgggcgtggtggctcacgcctgtaatcccagcactttgggaggccgagtcaggtggatcacgaggtcaggagttcgagaccagcctggccaatacggtgaaaccccatctccactaaaaatacaaaaattagccaggcgtggtggcaggcgcctgtagtcccagctactcgggaggctgaggcaggagaatcgcttgaacctgggaggcagaggttgcagtgagccgagatcgtgccactgcactccagtctgggcgacagagtaaggctctgtctcaaaaacaaaaaaaaaaaaaaaaaaagaaaaagaataaaaagaggaatatctctattctataaagctcgtattttgttttctgatttcattgtggcaatttgggaaatacagaaaaaataaataagaaaatagatacccatagccctatcacatagtgaaaactatcattcagatttcctcctggtctttttccccccagtgcataaacatatatttgaaccaatgcttatacatatttttcaaaatgggattatactatacttactattttcaaaagctgttttttttcccatgtgaaatgatgtattataatacttttccttggaaggactccattttaatccatttccatccatcctaagcagtggcaagtggtgttggcagcagctatgggatggtatgggagaggttttcagtccctccaagctacaggggcagacctcttggccaccatgggagacccacagtccctcacagcacagggtcccagactggcagttgctgtagcctaggacagctaccccagtgcttaatgataaggggatgccccagcatgtggtgcagcccatgtgttttcacgccaccggatctggttttgtttttattttcatcctcacagaaaaccctcgtggatgtgactttggaaaacagcaacattaaggatcaaatcagaaatctgcagcagacgtatgaagcatccatggacaagctgagggaaaagcagaggcagttggaggtagcgcaagttgaaaaccagctgctaaaaatgaaggtggagtataaaagcctagatttattttctatgaacttttctcctctttacttctcccttttctcttcccatcttcaacctttccatttccttttctccattctcttcttcattggatttttttttttttttgagacagagtctcactctgtcacccaggctggagtgcagtggtacaatcatggctcactgcaacctccgcctcctgggttcaagcaattctcgtgcctcagcctcctgagtagctggaattacaggcacgtgccaccttgcccagtaatttttgtatttttagtagagaaggggtttcaccatgttggccaggctggtctcgaactcctgacctcaggtgatccgcctgccttggcctcccaaagtgctgggatgacaggcgtgagccaccgtgcttggcccagtttggggcttctccataaatgcccccattgggcatgcctttcttggcctccagtcccttcaagggctctttagacactcaccatggtgctgttgttatgtaactgagaagacgcttgggatgcccacagatctgggacgtcagaagccttggagatctcttccttcactgtttagattttctttgaggtcccaaggcctttctgtttggcttgacaataaagagctgaggggcacacaaatagctggtacttgggctgtaccccaagtacaatattctcaagaagaaaattggtgggtgactagggacactggggaatgtcccatttggccccctaggctgggagcattccttagctgaacttctaatgccctagaggcattagtgcccctcccaaatttaaactgtggatagacttcctacccggtgacaggagcagatccatgaatggctcctggagggcacttaataaattatatcttggatgaattcctttttatgtaagtctgtggtttgaaaattttgctcagcacagacttaggctatcttatgagtagcgtatccacatagtttattgctcaaagcagaatatgtgagggagtgaaaggtggtactattggtaatttagttagggagacaaactgggaagtgtgggccccttcacaggggtaggctgggtggggaagaggggctgccggtccaccgcccggtctctgtattgccgccctggggatctgctgccagttcacttggcctgccacagccatgggacagatcatctcctctgtatgttcacttctaatagggcagctcttcttttccgtgtaagagttactttctcagtaagagttacttggggggtgaaaaaagtttatgttgctaaaaaagcctgaaattactgatttaagtaatttttttcagcttaggggatttattcaatcattcagtccacaaatatttattgagtgtctactctatgtgtgtgtcctgttcagtcctgttggttccagaggtggcctgtcaccaggcatctggggacatcattaggctgcttggcaatctggctgcttccctggagtccaggcctttaactccagcccacagttgcctgttttagagactgatgcttgttttcatcctgacagtggagttaaaaaggtttctcctactcctcctattttactccccaaattgggaaaaaaaaaaaaagcttcaggaactcagggtatgttacatgacctggatgcagagtgaatgggcctccagggacagagcccttccagcaagctgtgcgtgcactgcaaatggagcacacagcacacagggtctctctcagctggtcataagctctgctcaggactttccactttggaacttcttggtgccaacacttacccagtgatgagaagggagaagtcaagggcgtcaagagagacttgtcacatcttggaaataacatcatgtaacctattgagtttgaagaatgcttcccttttccagagtttaggtatgcagcaaactcagctctctgcaataggcgataacctggaaggaggggatgagagcaaaccttctgcagcataaaatcaatggcgggaagtctgtgtgtgagaacgtggcctggcaaacaggaggcaccagccaccaccaacctaagccctgcccacctgcaactccactgactttttctcacctcctaagccaggcctgcttcagtactaggggtgccagcttagtgttccccatgctaggttggaatgtttccaaaagcaacatttaggaaagcacaagggtatggaaagggtgagtccagatttctcctttgagcttagctggtcttacctagaaactggcttggccaatgcaactgatgagattgcgtagagaaataagtttctaccttttgaaaaagtcactcatgtggagcatacctttgtcctgagaatgcccccaaaattcgtgtgaaatgccacttttatttttctgtggctctgctcacccctcttcctccctttccctgttaggtcttgctgtgtctctctgctgcagaacccagtggatgggctcactacctctgtgagtccccacatgaaatgtgcagtggaagctgccaattcctctgggccctgcaaaagctgtcgttctgaaatgagtctcgttgtaggtggaatcgtcccaagaagccaatgctgaggtgatgcgagagatgaccaagaagctgtacagccagtatgaggagaagctgcaggaagaacagaggaagcacagtgctgagaaggaggctcttttggtgtgtgtgttgtagctgccgatgtaaacttaccgggaattgttggttcattattgttggtgatgtatacgtagtagtgtttattcttagaggtgggtcagtagactcagccatgggtaagggatcaaggaattattcatctgctcattcactcccctcccctcttcccctctgcctttattcatccccgtctctactcagaatagccccttgtctctgtctctaaatacacacctttttctagctcatctgacaatttgccagcatctaagcaaaccctgggcttgcccgcagctgtgccctccctccctccatttggttctctctacctgaaatttcctccttccctatctttgatcttgcctaagctccctaaaagccttaaatgccactctctccatgcctggagtctcttccagtcatggagccagaaccattatctgtccttaggaagctcactcactctctctctgcttttactttggaattcttttatacctgccattagagtggggctgtgcgtctcacatcttggcttttccaggagattataagttcctgaaggcggggactccatgtctggctcatctgtgtccgtagaggcttaatacatgttctgatgattgactgggttttcttgttagtaatgagctgatgtattgcattatgggagaaggatctgggaattctgcattcaattccagatctggttctaattcccttacacttctggcaaatacagtgacattctgagcatctactcaatgttattaaacatttgtaggcctcttttacaccttttggatataaagacttaagggaaaaaagggaaaaaaatgtagtgaggcccattaaccagccacatgatgtatctttattcataggtgagaaccagaaccgtgaggttgagttcatgatctgtgagacactttcaggttccaaggtcatgttttaaagagaaatcgtgatctagcaaggcctgagctgattggatcccggtgagtagcctcggtactccatgcctgtacttaggagggtatatttcttttgcaggaagaaaccaatagttttctgaaagcgattgaagaagccaataaaaagatgcaagcagcagagatcagcctagaggagaaagaccagaggatcggggagctggacaggctgattgagcgcatggaaaaggtaggacacagcgttgggcctattgcccacttgcccaaacttttccctgtaggtccatctgagatacgagaggccctggatatggattcctctcacctccaaaatttgcaattaaaaaaaaaaagacaaagctataaaataaagtataaggaagtccaacaacgttctcatttttcccatgataactattttgatgcttttaaaaaatattacttgtgaaattctttagaaaaattaatattttagcagccttgctttgctggtgccccaggtgtgaacttagtttatccattgaattatcaagccctatttaggtgttacatcaacacagcagccctgttgtttctggggcatgtgtctcaagggttggcttttccttgacacgctggggacttgagagagtagggaggccccatttctctaggtgttgtaagcaggctggtgagtgtggtgggggaacctgaggaaggcgggagctcagctgggataatgaagcctgtctagtgaaagggaagaggccaggaattaagtaggaagtggaggaaggggaggaagtggtgggagaaaggaaagaggaaaagaaggaagagaaggaagagaaaggatgggtgacctttagcaggtgacggctgacttctggacccaggagttcagggccaagtctgtggctggtttctgggaatggctccctggctgcatatgagtttgcagagagcagtgacctgccaagaccctgacattattagcaccctgtgactcattcgggatgccaagaatctccaatctgatgatggaggcagaggtggggcagcaagagcaaggtcactgtcaggcttcatgtgatgctgagaagaggtcgccttagctaatggtgtttgcagcataagcccctgtactgtcccctcataaggcgaggtgtcgccactatgggaactgcatgaaattcagttctgtggagcttcagagctcactgggtgcttcgttttagctctttagctttttacttgggagagacttgggcaaactaaagagtcaattacaatctcccttctaccccctgggaaaacagaatcccatcttttattgaagagtaggtgattggcttagtcaggactaacattagtattgaccagagggggtggtggtgaagattgggcaacaagggagctttctagagcttgagtgagcttcctcccacattattgtcctcctacaacagcagaagatcccagttaactcagatgctctctctctgggcagcaggtttttctgcagcgtaaagaagcaaggtgagccggcagcatagcagggtggtctgggggagatgccgtcatacagagaaaccacaggtagtggtcatgaacataggctttagaatcagacagtctggggatttgaatcttgtgtctctttgtagttgtttgcacttacttggtttttcctaactcagtctccacttctgtaaaatgctgataatggtacttcttattcttagggcttttgtgagcaataaatgagaaaaatccacgccaagtgctaagcatggttcctcgtatatagtaagggttcgatcatttgtggctatgatttttactctgttacgaggttgcctaaatgtctaccctcagagtcaggttgtctttagcacgacccattttatgcttatcttcattgctgtcttgaggttctgaaagtttcttgtctttccccactgattttcacatggagccctcatgtgggatgaatgggtagagccaggaagctggtaaggccagccctccctgccagcatttaggaaacacaaaaccttccccaagtggtgttggcttcttctttagtgattggaaatgtattgtcctttctctaaatcttcctttccatttaggctagagaaatgctctatttattgaactaacattaggtaggccaatttacactgtttccttttcagggataaatctgtgagagcaggaatctggccaaatcgctgtctcacactacgtgaacggcatgtcctaggcagggctgtggcagtgtacgtatcctgctctcagttttggattttgctcaaggacaaaccatgtgcttttgaatggcttctctgccatatgccttagtttactgtttctcttgctgagcactgtatttcaaacacctttttttctgatcagtaaaaatcttttaaggagtgttctctaccagggacccttctggggaacagataatagtctatgccataatctgggcagtggtttcacaggtgtttacaaatgtaagaaataattgtgcagtgtacacttaagatttattgtacctcaatttaaaacaaattttaaaagtgtgctgtaagttagaccttgctctactttatgacagcctttttctttcttgttttttgttttttttttctttttggagggaggcattcacttgtgaaagcttttatcactgttatttcggggctaatgtaaaacttccaaccacataggggcaggaggaatgttctgctcaggccaggccataagaatgtgcatttgctgtagagatttaaaaacagtaacaaaaccccagtcaaagttgatctacctttgttattttaaatatttcagagataatatattcttcctgcttaaggtggactgcttccccacccctttggcctacctcttggtataccactgcttatagcttcagaagttgtggcagttaaattttcaaagatttgcttttaataatttggtagaaaagaggtttggaatctatgtagctagtaagagtttgctgggtggaatttccgaacataaagatgaggaacattagttcttagagaaggacctaaagtaaaataatctcccaattagtgagcgttatttgataaacttgcattttaaggaaatttgttacactaacatctgtaatgtatttttagcacaatttcggttatgacaggcaccatgtttttatgaacatttttcagctttgtccaaagaaatgattccagactcttttttgggcaaacttctaaatatacatatatatagcaaagtgtacaaagtgcacggcttagtgcgcgtatgtttcctattgctaccatagcaaatttccacaaggttagtggcttaaaacaacacaaatgtattatgttccattcctagaggtcagaagtgctaaaatccaggtgttggcagagctggattccttttggaagctctagaagggaatgcatttccctgccttctctaacttctggaggccacctgtactcctcaacttgtggccccctcctgcagcttcagaggcagtagcagagcatcttccaggctccttctctctgattctaaccctgctgcctcctcctccttagaagggcccaactggataacccaggatctccccattttaagatctttaacttaatcacatctgcagaattcctttctccatgtaagataacacataggattcaggaatcaggacatggacatctttggagggccatgaatctgaccacaacatatttttacaagtgaatacacctgtgtaaacaccacaagttagaatataggatattgccagaatcccagagcctcttttcttgatgattcagaaaataataaagaattttgcagtatcacaagccaccagtttaaagtattgataatcagtatttggggctataaattttcactgatcctgggctgatggaatactttggaaaatgaatcttgaatggttttatttaggatgttttgtctctgacccataaatatatctataaatacacaacaacagacttggcagttttgagccttgtttgggctttgctgagcaggtgtgtaaaacccagggggtgtcatatagacttggactccctagtgctagaattgctaaatagacattctctgtcaaacttgggatccattgattaaaatatcagtttctgtttgttttaggaacgtcatcaactgcaacttcaactcctagaacatgaaacagaaatgtctggggagttaactgattctgacaaggaaaggtaagacgtaatgcctttcgtcttgtaatggatttaggttgtggacacgctgtgtttttatgacctcatttgacccttacattttcatttgtgtggttgtaccttattacagacttaagcatacataacattgggctgagagtttccaatatggaacaagtttctttggaagcctccagccacatcctgcagatcatggctggttgttagtgtagtggaacacatcaaatactttcacaagtgcaaaagtttggtctattaatgttctccatggccttgaactccacaggatacaccttgttgatgagaaaactcatcagctgtgactaataccacttgctttggaaaccaatttaaaacatctttctttgtttccaaactttgcttagtaaaaccttgcattatcctctggcagtgagtatataaagccctacatgaaaaacacggaatagtacgctgtctgttctagaaatcaaaatgcagagaggccattcaggggtctctagtgaaggaaaacaaggttgagatgatttgagtgttttgggcaagtgacttaacctccctgagtcttgcttgtgccacatggaaattcatctttaaacgggggagacgggtatgacggtgataacagtgcccatctcactaggttactgttgttaagagaactattgggcttgctgcctgccaaatagtacgtgctgaaaaaatacccatttttccttcctcatttgcaatttcagagttttcaaagttacaggaggcttgctagtcattaacatagtgctgaggcagagatggggcacgggaactagaccaccagacctttcctccagtgcccagccccagcggccccagagaactgaagagtccaagcaatgttggagaataaattgtgctgttgtaaaacaaaagtatgaaatgttttgtgatgtggcttgctctgtttggatgtagagaaggtctttcaacttgtcccacatttgccaaaaataaaggatatgtagagcaactgtgattccagaccttttggtattctgccgttgatttcagatattttattgtgttgctggaccccttcttccccgtcctcccctccaagtaatttactggatgttccaatatgttaataaccccaaaacagagagcttctcagatctgtaaatggtgcaaaaaaattatctctcagcccctggaaaataatcatccttatatgggataaaacttgcaaatgggaacttgaaaaatagtcctgtgctcctctgttgtggtagtttgttagtaatcacactactttgtgtggtcatcacataaagtaagaagaatggatcttagagtttgatttcttgttcttggaagcatttttaaatgtttttaaatttacgtttatttttttaccaaaccttccccaaaagatacatgttttctatttttatttatttattttttttttttgtggagatgagggtctcagcatattgcccaggctggtctcaaactcctggcctcaagcagtcctcctgccttggcctcttgaagtgttgggattacaggcatgagccgccatgcttggcgctcttggcaatattctttaaagctgtgactgttgctactgctgttgctgctttggtttaggactcatttgcttttttctcctatttgtgttaggtatcagcagttggaggaggcatcagccagcctccgtgagcggatcagacacctagatgacatggtgcattgccagcagaagaaagtcaagcagatggtcgaggaggtaagcatctgcaaaaggtcacaggcctgggattgcttcctgtggtggggaagcatccccagaacaagtctgccttgcccctccatttcctgtggctcacaagccgaggtgctcaggccactgccatctaggcccagagtgggatttccccacatgtcccccatggactgatgacgatgatgcccctaaaagaggggtttcctcaggtcaaagggttacagttaagaaagctggaaagtgcagttcataagctcacccactgtgaaaggacagtgatagcctgagtgggtacccacagctcaggggacccaagggggtgatgggcagggtgaatttagcccaggtccctgcactgcctccacagccgtctgtctgtctctctctctctctctcagctaccattcttgtcctttatcgttttctgggtgtgtctttcattccctttccttgtctgtttctctcttttttctccctccttcctcgttctcttctcccactcctgcttcttcttccttttcctttgccaccatcctttctctcctaactgtctctgtaacaggaaaccaagctatacatttactgtttgggcatagtttactattctcttttttctaaatgagaaaacgggtaagttgaacatttctatttctctaagaggaacaaaatttgttttaacttgtgtcaatataatccgcctctcttgtggtgatgttccaaagaagaaagtccgtgctctgtaaagctaatcacatattattgtagttttcttcttgctcaattaaaaaatccgattgaaaaatctgatagaaaaagagcagttagtactaacagggttataagaattcccttgagtctaattctctaacctgcaaagaaaaaaaaaggtttcaatttaatcaaacatttggttggcagtggaaaaatgaaaacacattttccttatattaagtactactttaaaaagttatgttttattaatgaattattaaaattaaaagcatatctacttctaagaaataattcatgtacatgacagacaaatggaagattaaaatatatctattttattaatctctaagatattggggatattaatgttggggagttaaggtcagagaattgtgagtatgggaagggacatctttttttattgtgtgtaggataaacatacacattagataaaagtttgtccgcaaatgagaagtgcagttatactgtgttgaatcatgtacatcttatattggttcacacacaagtttctggggagcagtggaatagcagaggaggccacgcacgcatctttgcaatcgttttgtgcatccaggcaggagcactgcccataacagtaatgcggagggagatcctgccctatcgtcaacactaggtagatgtcaggagtgtattttccaaggaaaagcatcactttgccacagttagcatctcagtgagccttggccgtcggggcatagtttttctgcttttgaatttcacacgcacgaagtctggggcaagggcatcccttattttcccctatgcgagtctctaactgtgagcactacatttctcccacctcaccacaggggggtgtctgtgtcattcttgtatctaatcgttagagaactattgaacaaaacctcatactggttggcttctgattcacttaaacccttacctgtaagaggttaaggctgtaccagaatcagagacattgtttttttaaaagacattttcaaagaagtttagaattctctgtttcctaacttacttccagaatataacaaacctaccaatttgaagagagtgaaggagtacacatacgtacacacatatacatatgtgcatatgtatatgtgtatttatacatgtgtatacatatgtatatgtgtgtgtgtagggatgcatataaagatcactgtccatgctttgcttttttctacctgtgatttcatatcttccagataagcttctctaagctttgatgtggtctgtggtctggaaggcccagtcgttggaaagaaatcaccagctaaaatttaggatgccatcagagttagcaccccctaggggctggctgggtttccacagtgaatgtagaccaccaccaccaccagcaacaaaaagagagagagacactttttattcctaataatttttactgcctgatttagaaagtttgtgtttgcccagcatactacattaacttacataagaaaaaaaggatagcctagaatctcatttgctatagccatttatgtgaatattttttttaaaagttagaaacatggtcaaggggcatggacaggtgagcaccttcagaagagcaagaccaggttggaaaggagttgagaacctgagtaattcagggaactggggaagacatgcccaaggagagatgggagctgaattcacatcttagaaaacatgagggaatatgtctttgttttgtattgtgaagcaaggccaggccagaaccactgggtgacactttcaaagaggcaaattgcagctcttcattcacaacaaagaaaacatttctaatactggctgcactggtaaggcatttagctcttcatcatggttacgttctttacaaagtaagaagttgatttagaagttctctagtgttcctccacaaattctgtgttctgtaaccttaaagactgtgtggaggaagtctggtaacttcagttaagtgttcatcatataaagaattctctattgtttactatgctgtgcctgtttttgtgagctcagccttatcattatgttgcataatgagcaaaatcagcaaagtcgtaactaaatcacttcagatcacttggagcaaattttgaaaaatccggagtactgaattggtcacttgtgaaatgaatcttgaactctgactctagaagagaagtatgttttcatctgtgaactccggctccccaggcatataggcagcctttaagtgtagcggatgttaaggaccctttttcttccctcacatgggtctggaagctcgtcttcatcatagcctcactttcaccatggatggaagtctcgtctccatccattgttggtatcattttggccataatgtccatgaggaaacttagtttttttaaatgatgggcttcttttgtttagctcaaaatgtccaggtgtcactactgcgatccttgggaatccttaaatgttaagcaacatgtttcttctcaccttagtggagtatcattttatcatagtaataataaataataaaaagtaactggcccaggttttgtcatccttagctcattaatgacttgatttccatggtgggagacagtaggacttgtactatgtaggaagggctcatggtgggggtgagcccttttgaaatgaaggattagtatatatcttacggtgtcaaggtcattgagaaaagataatgcaaaacgttttctgtgaaatgtggaaccaagtccctctcactaggctagggctttctactgaattaagtctcctgtcatggatgtcagggggttgggtatctcccccatcactagttcttccagctgattctggctttgataaaaatgagagaacaaagccaaaaaagccccacgtgtgcctcttatagccggaaaatatagaaaaatgccgagggattggaaagaaaaagccctcaaggggaaattaattcattcatccattcagcagatacccaccagcacccgctccgtgctggggctgggtacacagtggggagtcaagcagacatgggccgtgctggcacggatcttacccactggtgtcacccgagttccagggtagtcttgcctttgggttttattatcctgttgaaaagctttgttgggattggtctttggtcctgaatcaagctgcattctttagattgccaggaaaggcactgggagagctgggaggagtgtaaaaagtaagagagcatcctgaggcccccacagtgcccctctgctcacacatctttgagtgtgacttcttcagtccacagagtcattcacaccctctttacctgctctcaccatggctctcctgctgccaaccaaagcagctctcctgccaaggggaaagtgatcttaaggaaaaaatcaactatttgccttccaagagggtgggtttacatttttgccaatgggcagggatattgtttagctgaataaacagtaatttcttaagaggttttttttttgttttttttttttttaagctatatcccagtgcagccattaggcatcctttcattttgtcatgtctttcttttgatttccctttgccatttgtgatataggaaatgtttcttccaacagggtctgaagggagtttcttttcatttgcagaggaggcattttctttagacttcttttgctgaaagcaattacactctaccccactttgctataattgagatgtttaataagtgcaaaggtgcaaggaattgattttctcattagtgcttctccacccaagctacacattggaatcacctggggagctttaagacatgcctgaacctggcagatgggatggaggcagactgagcattgggttttgtttcgttttaaaaactctgcaagtgattctaatatacagccaggattgagaatcgctgtcccggattctcagagcggtggcctgactctccttgctgggtttcatgttcatgcatttggccagcatccctcagaagctcctatgcctgaggtgggaagctgctggtgaactcaataggaagggctcaacagaaagcaagccagggagacagtcaccagggaccaggagcacagaagtgagaaagctggtccaagtctgtgactctctgggcactgtcaggggaccttcacttcttgccagcccctggtcctgggaggattctgtgacagctcactctttttttattttttattttgttttagagacaaagtcttgccctgttgctcaggctggagtgcagtggtgcaatcataccttcctgcagcctccaactcctgggctcaagtgatcctccccactcaacctcccaagtagatcgactataggcacgtgcacccatgcccagctaatttttgtattactgttattattattattattttttatagagacagggtttcactatgttgttcagctggtcttccaactcctggcctctagcaatcttcccatcttggcctctcagagtgttgggattacaggcgtgagccactacacctggcctgacagcctaatcttaatagctgtactggcctggtggtatccagataatacaaacttcccaaaggctatttagacccatctagagagatgttactaaggtgggaagaggtacgcttgttaaatagataatagaaacttaaagggacagaatccaatccacctaagtccttgaaagctggactaccactaagagagactaagggtgattctcatggatcctcttccaactgtgcatgtatgcacgtgtctgcctcgccctgctttaaattattcacttctgtctgtacagaagacgttacacttggccacatggtacccctttagaaagagaaggcaaaaacatcttggttaaataattatattagcaatgaccacttctcaaattcaaggcaaagcagaatattatttgtgattcctaaggaatgattttgaaagtatttaacggtcatctcttagattttttttaaagagtgatgctgtagtcataatgcagcagttccttgggggaaacaaactggatcagggagaataacagatgagtaagaactcttcagagagttgagactttgagtatctggctctctagccagttggccaaacaaggctttacattactagtccctaaatccacatgcatctgcagttagagacctttatgtgtctacaacaaaagatggcctagaaaaatagcaacaagtatggactttagcatcagacaaacctgcctttgaaaagttattagtttccttgtctataaaatagggttaataatagtatctacccaattttttgtaagagttaaatgagatgacatgtataaaatgcacagcatgttaattggatcataagaaataataaatattagtggctgttattattaccacctgtaaatgggttcggctgtgtatacctaaagttaagtgaactaaaagcaaaagtagctattgttgatttcctgagcaatgcacggggctgccctttatctttccctttgggagtcttgttggccacattcaatctttgggtatacttctctcttctcttttgtgctctgtgctgttttctagcttagccatcaatctcttcacaagaatatttatacaaaaagcgatttttaagatttaaatttgcttcatcgcaagtatctgccatttttacatggttcagtcatttgctggcacacaatttaattcaaaactgttgtgtggtgtgctgaaatgtgcaacacacgaaagtacattttactaaatgccctgtgtttagaggatttcaagtacttctcataattggtaattagccaaatgggggtaggggaaaggagccatagcaccaagcccacaaacctaatccactcaattgaactgtctccagatcatgtcgcacgagctcttctccagatttagtctccggctctttggaagatgataagttggtagcctgctctgggttggaagcgattcctttattgttcgtgattagaagaacacttgtacactctctgctgggaagaggtggtatttatctatgatgagccaatgaacaaaacaggaaggacatattatttaaaggaaaatttgaccatgtggggctcttgtttgtgaaaacacccacatactgtcaccctgacttgtacagcctcaaactgcagagtcaagagaactcacagatccacagagtatttttaggaacttgagtagacattgaagaaggaactgcaatgaaaaaggctactgaaaaaccattcagaaagatccaggtggaggcttggaagatgaatccttacttatggaaaagctgccaaagacatctgctaaggagatgggaagagagcttgaagaatgttagtgctctgggaaggaggtgctcccaccagatcacccccaagaaagtacaggagcagccaggtatccatgtggtttggttctatttgtatatgggaggtggccctgaaggtgtccttcctgaatggatatcaatactcatcttaggactcttctaagaggagtttagcttgcttctatcaccatcagcattttgcctgaattggttcaaccaacttcacgaaaaggagtgtatctgataaagagaaatctatctggctgaaatatgttgaactgaaacatccttcatgtatgttttatttttatagaggtctttcttgagattgctgcaggcattggtgttttatcagaacatggcagttttgctgagaactagcagtagtagctgcagtcatagcaatgggtggcatgagtctacataagctgggagatggggctcgtggagtgagtgcgttcagaggcccagtgtccctcagacgttggctagttctccactcctatcactccttcatggcaaagcaggcatgaagctgctttcttgctaatatttgcctttgctttcatttagatgcttctacccagcttaagcaaggagggaggggatgggaaagaagcagatgaatacttttccgcattagttattaaccattaatattgttcacctgtgcacggtgctgtgtttagacacagatccccagatacgatgctgggtattcagacttccactagggagacagaggcagatttgagaatctcatctggatgttagcttagtgttgttacctacactgttttttagggacgcctttattgctgtaatgtttttctaagtctctggtggaaaagtcactggcatttgttctagcagcattgattcattgccaagttttaaaaaaggaaataattaagagaatgcaatgacctttagagaaaacaggtcacccatgtaagtcctgctttcagggtggtgtgctttcttctgcttttagagtttcttttctcttttgggctatgaaccgtacctggaggccaggcaggccttattctggagcagatagtgagtgaggttcctagagtactgcatagcctgagagtgcctcctaagtggatgccctccacacctcctgcacttggccctggccctgggtcctaggctcattgttgatcttcttagatctgggttccttgcattgcaggacctacctcagcctgctcttgtctgcctttgctgatgcccctcaattcacctctttcctgcctgtactgtgatatggtgtgaacttgacttatactgcttgtgaaacctgagtcatgtgctgaaatcctgccccgccaccgctttcctcccttaactggatccttagccttggactccaaggctacagctctgtctcgtggccactcaagccccacccaaaggaggtgctactcaaaagtttgaggcaggagtgatttattgtgaatgacaatgttatagtttctaattctagtgtttagcatggtattattccttatttattttaaaatcttagacaatttatctaaaatgtcaatttttagaaggtatcagcacaattgtggcagccttttttctgtatgtgttatatgtattatttaaaaaagcaggttcattctatgacaggtattggtttcggtattcacaatataaattgtcttttcaagggaaaggatattttctttggaaatgtcattgaatctatgttctctttattgaaattgttctaattgactttgaactgtttctcagacacctggtgcccagtttctggccatagaaactatgtgaggctgagtaattcatgttttgggtcactaccagtcacgaatgcttctctcattccaaggctatgcatatggatgtcacattcccatgtcaatcatctctggaaggtattattcgcccagttttttaagcatgggaaactgaggcttagagtcttaaaaaataagtagctggcagtctctcagcaaataatgatggtgctgcactacagacccagatctgtgactccaaagtcagcctttgttcttttcttcttgttacttttaattggaaaaaaatttaaattgcaaaaagttgtagagtgataaaaacaaaaatccacgaatgctcttctaggattaacaaatgttgccattttggcacacttgtttctgtttttttttttttttttaaagaaaagaacacatcacagataaagaagaggttctctttttacctgtccctgattctgttccttttccttctttcaccctctcttcttctcagaggcagtttggtctctaggccatgccttgatgattttactgtgtatatatatatataaaattagtatgtggcttagtttgtgttttaaattttacgtaaattttaatttataatattaaaaataaattgtattgtacatattttgcaacttatttctcagttttgtttctgctgttattccacatagatctggattattcatttcaatggctaatatccttttatttgaatatattgtaacttatttatcctattgatagacatttttattcttttacaaacaataccaacatgtctccaggcttctctaactaggaagtatacgtaaaggaggaattgctagggcatgggattggcataatttcaccttttctagatattgcccaatcgctgcccacagtgcacatacctttccaccagtcacatgtgagagggcagattttccaaatgctcatcaccacttggcactgtgtggactataattttggccagttaggaaatggcatctcattgttttcatcttaatttgcgtcagcctgattactcattgaaacttgtgaggttgagaaacttttcttaagcttattggccattcaagtttcctcctttatgaaatggttgttcatgtcatttgctcatttttatattagattgtttttcttttttccagctgacttgtaggaactctacatcttatcaatattaatcatttatcgaaaactatttgggtgccattatcttctcctagtcaatgttttttgtttgtgatatcttttataatatataagtttttaatgttggcagaagtaaagttaatctttttggctgtgttgtgtgtcttgtttgatgtaaagatagtttctgtaatagttttgcagtttgattgttcatctttaggtcttcaattacaacctgcacatccatcccctctatcctctttcttactctgtttttctccatagcacttatcatccaataatatgtcatgcactttatttatctgttttgcatatatattttgtctgttacctgtttccttccactagaatgtaagtcccatgagggcagggacttgcatctattttgtttgtggttgtatctctaacacctgggatagtcactggcaaatgatagttgctcaataaatatttgttggacaaataatgatccatgtagaatttatttttgtgtatcatatgaataggactccttttatttttggctcacggaaagcttgtttctctaatagcattgccgtactgatttttttcacgtcgctttcgtcaagctggagttgtttcccctgtgccattgtctttgaacaatcctgttttcctgcccctctgctgaagactgaaggaaactcattccttgggcttaagagtgggaataaggatgaggaggagccaggtacaatttatggggagcttatgggacagttggtacacgtttaagaagagcctcttatgagcatgagtgcaaaaatggacatgagttcctgctctcagaggaccttctggctgacatttaaactcatttgaacttgaggcagaatgtcataggtgctggaaacacagaagctgggaaacttagtggttaagttcataggctttgagtaaattcagtctgcttttgcatcctgcctctgctactgactaggctttgtatcttgagcaaattatccaagattcagtttccttatcaataatatgggaatggtcataacattacctcctcaagtggtagttatgaggattgactgatgtgatgtgtgctaaatgcttagcatagttcctgccaggacaaactaattctgatgtgggtggagagtctttagggaggaggtagtgtttgaccaggccttgtaggatgggttggatttttctaggcagggattgaatgggtggacatgtcagacaagatatagaataaataaaagcaaaaacatgcagaccagaaagtatagggtgagttcacagagcattcatctagtttggatggtacgagggagtgagaaatgaagaggctagaaatataggttgacaccaattgtgatggtttattagcaccaagccaagaaggatgtccttcatcactctgctcataattcctcaatggctccccattgcctgatcagatatgagctccagagtggtggctctggccagtgggtgctgggtgaataggaggggagaggagcacggaggacagcaagaaggctccaaggagagccctggctagtgctagagagtgtttactttccatgcacttgaactttaggaagcgcttccaaaatgcaattttttagcatcagctttgtgccagatgtggagctaggggcttccatatatatgtattacatgaatttgaagcagttcactcccttggacactcctgttcaggatttggtgttttgtctctgaaactgaattcatcgagaaaagcacaggggtaaataagcttcatccccatctccattccatctgcctcctcttgaatcatagagggaaaaaaaggacagcctaaagaattagggccccagcagatcctttgtgacagaagatatcacatgtcaaccttcctcccagccctgccaactctccaggccagctttgcagccataggttgtcatcactgggaggatggaagcaagcaaacctctgaacagggtgtggtgtgaataggacagcctgggccttgccctcacagatgcttacttgggtcgtaatatcagccctatcagcatccagatgattgtgaagggagtgaatgaatgatgaaagtcttggcacctcagtttcatggtctggtggggataaccacatagggttgtttctgagaatcgtgagctaagccagcaaagttcctggtagcttgcatgctcctcctttcttccttctcagagaatgtgctcagattgggaagcagtttaaccgtccttccctgacatttgtacagccaagtcatgtttaggtacccgggggagccagagtgctcctcctctccttctggagaagttgggttatctttaatataagatagaaatcaaaccaaattacattattttacctcagaaccccgttgcaaccgatccttttgaatggtatagttctattattatatattacttcaaacttaataggaaaaaattgattaaaatatgtgccatgttcatatctagcctggctgaatgccacaagacacattaattgaaaatgaatttccacaaacccaatcaagcatcatgaagatgaaaaatgtacctttttccctccattccttcattgatttttcattttccccactcagtgcttcatttagcaatttttcagtttcgttttgttgtggccttaattcatttcctttactcccccccaaatgagataatgtaccattttcttcatgcttattaaactcttctttcatgctgcattagtgcagggcagattctgatcttgtcatatttctctatgcattattttttttgttaaaaataggctgagcttttttctttttattcttacattttgtggtggcttttatcaaagagaatggactttaaaaaatacagtaactatgaaattacgatgttacaggacttccaaaatagaattaaggaatgctatgcaaaaataaaacactttttctgaggaagagtgtaaaatatcaattattctcatagtcacagtgggtatgtggggaccagacacaattcctcttttgttaagagaattggaaacaatggtttaccagatcatagagggatcaagaggctgggttaaagacacagcactgtcaggaaaagagcaggcagagggagacgacggctgaagcccaagtgagctctagaaggttctgtccctgacccagtcagttcaccatttccctggatttctaggggttttgaaaacaataatggggatcttcaaagtatttccttgtaaaattttcaaattttcaaataacgtgatggcataaatttcccctgaaaaggctgtaagaactcacaataaagtatcatattcctctcttttgacctagaattcatagccctagtaatctcgttttgattagatgctttgattggcagttatacatctttgataacattttcaatgtgaaatgaattattctttcgttaaagccattttaagcagaatgtctataaatgagggcccacgagaaggaataacaaagcaggggtgttggggatggtggctggggagctttggtgtatttattaacctgtggttgagttttgcgatgtgtgcaagtacacacagccccgacactctgattttgaaaacaatgaaatgaaaatgaaatgaaaacattataaagaaatttcaaataaaataatttaaaatgtttattgcaggggaagtttatgccattacattatttgaaaatttgacaatttcgcaaggaaacagcttgaagttccccatagaaatccagggaaatggtgaactgactaggtcagggatggaattttctagagctcactcaggcttcattcatttaaaatgaaaacaaaataaaacaaattttaaataaaataaacaataatgtcaaataaatgttcaaataaaataaacttaatgtggatttaaaatactgaattccattttccttataagatttaaacagtttgattaaatgtgaccatcagttttgtttttcgttttctgtttttaaagagtttatttgagcaggcagcaccaggccacatgcaattgagggcttcacctagggggcttgaggggaaaacttttataggtgtttatggaagcaagacaaggaaaatatttgattggttaaagcagaaagtccctacttaggccacacctgtaatcccagcacttcgggaggctgaggcaagaggattgcttgaggctgggggtttgaaaacagcctaagtaacatagcgagaccctgtctctacaaaaaattaaaaaattagccaggcatagttgatcacacctgtaatcctagctacttgggaggctgagatgggaggacccattgagcccaggagtttgaggctgccgtgagctatgattgtagcactatgctacagcctgggttacagaggcaaacgctgtcaaaaaaaaaaaaaaaaaaaaaaaaaaaaaagtccctatttagaggttagaggttagttggtgttttctgattggttaaatttaaatttcattttcctaagctgtgaccattcattctgacatgggtttcagtttgcttaggtcagaacccaaggcactggagccacctcagcctaatggcctcccaattaattattttaatggttcccctcttttggctagcctttcatttgtgagagattgatcaagttttagtgtgacatcttctgttaccatcatggctggttttcctttgtttcagcgggaaactcctaagtgtgacgtcagttttaacctacctcctattatcagtaagagggggcaggagggggagttgattctacacatgacactcccagtacataatcaaagtgatgtgcaccttttatatgctctgtattggtgtgtttcctgttttacataaggcatttttcgtgtttgttatcctttgccagctggtgaaagaaaataccccaaagcacaatttcttaacagcccatgtcaagcgctgtctggtatttaatacttatttgctgctgtgttttcttcattaatttctctccaagttcaatacggagttatgtttcatgagtcttgcacaattgagtgctactcacatgactacaatgctacagccatctcattttctgtcctctgatgtgaaatggactgtgtcctacatgttactaatgggaagaaattccaggaagttgagaagcctcacaacttccagctgtggattcctcactgaatccataacagaaccatactacatttttgtacaatttcactttggtctggttgacgtataagctcttttcaaaacatattggggggactttttttttttttagctatagcaatctgtttctaacgcagtttttatttaaatgtgcagattggcaagggtgatttcagctcctgagagaagttatcttttatatgagataattgatgcactaaacacttgttccctgtgggtttggggtctagtacaagggaaaaaagtcaactaaggatggcagtaactatgatgtgtcctaacaggggtaggttcaaaggctgagctatcacagagaagggggacacaaaggcagcctggaggacttggaaagcgctggcctaggtgactgtgggtagattgtgacagcagcagtttttctggtggaaaaggggatggagggtggggaggcattcctaatggagccaccagcctgtgtgttcaaagtcctggaggcgggaccatagtgtgttcatgcagtgctgagaggatggagtgtcctaaatatagggttcattgtagggacaggatgggcatgaaatgaaagtgggaaaatagggagcacagcggaagggcctcccgtgccatgctagtgagttcgaacattaaaagcgtagggggtttttaattgggagagtgagatagtctgcattcctggtaccagagcacctgtattttgtaaaagctccctccatgggtttccagcgtgtggctatggttaaggatgattacttagctcaaaccacctatgcaggtaactcgattgtagctaatgtgaaaaaaaaaagccatgatcagttttaagaaactaaaagaacttttatttcccctccctccttaaatatcaaactggcctgtattctaagagactaacatcctgcatgattgatcgggctgcaaggcccatattcacatattcagtctgagttacaaagaaacatactcatcaaaagaaaaattagaaaaaattctattaacatcagttaaaaggtcccagattttatgaaagtgtatttttccccttgttctataaggaggcctactgttttgtatttaaatttagctgttgcaagattctgttcttgtataaatcaaataggtgaggtccagaaaatgagtgcttctaatttctcagttcttaatgccctggtttgagtttggtaacttgcgtcatttaccaccacctggtgacagctagaactaaatgcagctttgtgaagggtaaattgaaggtcaaactttaacatttaatgcatcaagaagtgagatcaaaggtgcctaatggatttcttgcataccagctatatggtaacctggattttggagtagctcctgatttgggggttgctctggggacatgtgtttagcaagatcatcttggcccaactgggcctccaagcatctgatccagacagttttccccctgaagtctatgggatggattgtttaggaatggctggatggatttgttgattcattcatttgttatctgagaatataaagatgatcaaagtctttactcttgggaaactcacagcctagggaaggagaaacatcagtaatcatataataatagctaccttttgagtgtttatcatgtgctaggtgctacaagagacaatatttcaaggttctttgaagttagtagtcagaaacaataccagccacacaagtgtgtgacttaaagtttgtaaaaaatgaaccaaaggcttgagagtcagatgttcctaggaggctatcaaacccaggagcatgtgagtctatttattttagaagctgagtgcgtcacttgggaaagggatgggaggttcttcggggcagaccactggggagactaagttgggattcaaggttggcaccccttggggccggcagtgcactgactctgccagccttagcatccttagtgctcttatctgaacaagtcaattcagatcacagaatatactagaaaagaagtttctgtaagaaatgttccaggataaaagcaaatctgcacagatagcattaattcagcacaatagcatacttgtttcttggagcaccattgctgaaaaccatgagccttgttagaagctgccgcaccctcaaatcctactcctgtccagctccttctccccagaaccaagtgtctctccagactagcatcagccctctgctctctcatgagaagtctagagaccttctctctatagcactctctctaggtgatgtattaaccattcactgatttattttttaaactaccatctaggggacagtgaccagtaggatcctctcaatatcttactatgagctgctcattaaggtgttttaaaaccacctctcttgctttccttgcctcacaagccactctgatttcttcagagacagtgaaacgagtgtatttgaaatcactttttacatcatttgattaaatattacccctgactttcttggaagcttttagttccattttgcctttcatttaaagattttaaaagttaactttaacaatcttaatactataaaaaggaatgaaaaagacataccgtgagagtaatttttgggaactatttctacaaaaatggaaggaagtttacacaaaacaaactttaaccctaccacaaccccagaagtattgcatttatccaacttctcttccagcttttactttcatcattgtaaacttttgcttttctatcccttgaggctttttgtaaactttccattttgcagtatatttgtttttagtgtttgtgtagtatactccatgaaattgatatttcataatttattaccctttcctttagtgctagacattaaggttatttagtgctagacattaatagtccatattaatggaaataaccttatttctctctattataaataatgggagcaagaacatctttatatatagagctttttcctatgtttgaattatatccttaggataaattcccaggagtgggattagtggatcaaagggtatgaacagctttatggctcttaatatttattgctaaattgcctgaagggtcatactaattcacaatgccacctgcaacacaggagaggagctgcccctcccagtcctgccaacgctcatttcttcagtcaatagttttgggcaaatttaataggtagtcaagggtaaccattgctgtttttaattggtgatgtctttaactattattaacattggacattttttcttacgggtgtttctgttctattttgtatggtttacttttcatgtcaaaggattacattttttgacaccatgtgaaatttaaaatacttgataatgaaaatgccaaatgcacacagaacagagagagtaattgatggagccctctacgttacccaggttcagcaaatagcaagatttggccatacttgctttatctactccttcctcttttttcccctcttgtgcagtattttaaagcaaatcccagacattctgcatatgtttcctatacacttcaccgtgcatctctgaacatatggactttttcttacataattataacactatcatcacacctaacaaaattaatgataattccttgctattatttaataccaacctgcaataacattttccaaagtgtcttttcttctgatgctttgttccaatcagcatacactgtgtttacatttagttatgtttctaaagtctcctaatctagagcattgctgccccatctctcccgactacttttattcgtacctaagaactgagtcagttgtcttgtaaaaatgttcacattctggattcgactttttgtgtccgtgttagctctagaagcttgattagatcaagtttcaccttttcggaaaggcaagaacacttcatgggtgatgctgtgtgtttcatcgtgtatcacttctggggtgtataatgcctggttattccaccttgggtgatgccaaggctgataatggagtcaagtggtgacaacccaaaacatgattgaatgttttttcattagcttttaccatcatggtttaatctactgatgatggatgcttgaagccattatttcatagaaattgcaaaattgtgattttctaattctgtcattccttggccattgattaactggaattattctgtcaagtaaaactagggctttttagagtctcaaaatgcagtttgaacagagaaggcaagacagatgctttattttttcctccaaactcctttccaagtaaggagttgatgccttttttacatccattggagtccagtgagctgttactgttttattctaaagacatataatagtcatgttctttaatatctttatatttcatgtgttttactcaattacactcattattatttttgatgttcagaatgttccatccttggcccaaggggagacacctcatgtccttgttttcaggcataacaaggtatctcacgttcatctagtttatttttttgtcccctgaaatgagccattccaccaagatgtcctgtgtttttttagtggggaatgctatttagagaccacaatctgcacatgttatgttcttattgtttccaagttttctcagtagatagtgtagagatacatattttacaaaagaaaataaaaattatgaattcatactgatattgtcattttaaattgaacaaaattttgtttacttctttgatttcacacttgtattgctttctcttacagtaaaaatcttggttccaaacatgatgataccacaatatacatcaaacggtttcaaaataacttcagtgttactgctaacaatcttctcagtgaatgagagattactttgcagctctatttatctttaataatccactaagaatattgagtcaaattactgtattctaataacacttggattaatacttctcaccaatttgatatacatcgtttcttcaattcagtttgttctcagattttagggttcactttttttctttttggcttcattttattttttgaatctgtaaaatatgctttcaaagttaaacctatgtaacaaggcttatgtttattacataaacctatgtaataacttatgttatcctgtctccttcacctaagttcttccctttccctattggtagctatttattaataattagggttcattttgtctttgcagtgtttcttttgcaaatacatgtgcattcatgtgtccccacctgttttacatcaaagcgagtatactgtctaccttgccatacacttcatcagtgtttttgagatctgcattttttggaaggttacacagacctccatcataccatgcatggtttaaccagtcgcttattgatggagttctgttttgtgtttcctaaaataacacatatcctttgttcatatcatttcatattttggccagtgtatctttggtatctattcctaaaaatggaattgctgagtcaaagggttaatgcatatgtactttttctagatactgctatattcgcttccataggaatagtgtcattttgcatgagaaggattttaaaatttgttttgttttcagacagggtctcactttgtcacccaggctagggtgcagtggcatcatcatagctgacttccaccttgacctcctgggctcaagcaatcctcccacctcagcctcccaagtagctgggactacagggacacaccaccacacccagctaattttttgattttttgtagaggcagggtctcactatgttgcccaggctggtcttgaactcctaggctcaagcaatcctcctcccttggcctcccaaagtgctgggatcataggagtgaactactgtgctcggcctgagagtgattttttgaaataattttgtgagcacacaaatttaatatacaggatttttggaaagttaatgtgttattaatgatcctgcatactgttcccactattatgcataacacggcctggtacagagtactctggttcctgccttcagggaagctatggtttgtctagggagacatgatgtatgattggaaaacaaagagtagtctaagatagaatatattataaaaaacaaagatggatctttttaggaagcctttcttgcttactccaggccacatgagtcttcagtcctctgaatttcaacacttttaatgagacttctaatgatccttttttcaaaccaacttttgacacttggttgaacaaatatgaatgtattgaataacacagccaaatgtttgaaatgcaggctgccctgcaaattcaagccgaataatcattttttggagagttgtatctacatttcccaaagcatgttctctggaagatcttctggctgttttaaagggttacacagcaaaatcagtgtggaaatgttggattaatcaaagctgaggagctgtgactccagaatcatgtctgctgccccaagctcacctgttcacacaatccgcctgtcttggagcgtctcgcgttaatactgttccacgaaacacagagaatcagtatgcaggctgtttcaatgaaaaccatccagccccactggaaatgaggaaaaatagaaatagaaataaaaataaatgaaaaccaagggcatctattccagttgataaacctgtacttacacaattgtacatttttgattaacaattttccatccctttctttctagattgaatcattaaagaaaaagttgcaacagaaacagctcttaatactgcagcttttagaaaagatatctttcttagaaggagaggtaaggatctctgtttctttaagttggtgtcttccctaccattaaattttatgttgctaagcctaccaccgacacttaattaaaaatatggctatttcccggccttataaaattgattgagggttaagtgccagccttgaaaatgaggttctgacagctgtttttcctttaccatcggactcccctcattccagttgctgctgacttctgctttttggctctagtttttcttattaaagaatcatcctagcaagcctgataagctgttgattagcactgataattccccgcatttgtccagtgctttataatttgtgagatatgttcatatacattccttacattattctctctgcaactttaagaaaggcaagactaagattattatctctgtattaatacatgagaaaacagaggcacagagaagacaggtggttttgctcaaggttgcccagcttaataaatgtcagagccaggctgaaagactcctaaatccagtgctctcctgtcacagcgagtgaagatgtgttagaggggacttaattttacctgaaactttcagatgcttagtattcttgactttctggctttttgaaagtcatttggggattttgtatatgttccagagaagaatattatggggttggaagaactttacaaggagaagtcaaaatctatttgctctaaaggttctttattagagcttggcattgagcctttgccttttgagacttcctgaaaagctggtttgccaagcacctgtccttatctgtgttcctcgttatagtccttccacagtgagagagcccagcagacaatgataaagtaagaagaaagagaagagaaaactttgattaagccctgctgtgtgttgggcactgttagttactttggatatgttctgtgtaacacagaagttaagagtggaatccaacttacccaagtgtgaaccctggatctgcttcttatcagctgggtgatgtgggggaagtttcttatcattataaaggagggatcataactgtgctatgtgtgggtgacagtgaaatcagaatgtatagaaggtgcctggcatgtactaagcactcaataattttaaacgtattattgttgttccctctttattaaaagggacaccctctgagttagatgatattttcccccttttttagatagggaaactgaggttcgggggtattaagaagtctgcccaaggttacagtagagatgggtaagcctggatccagatcctgagctctgaaccaccatgtttgagtgggtggtgagctgagccttcttttactctgtttttgaggggttgccttacagcagtcataaccagaagtccctcatggcccataggggcctggcaccagattcaacgcccaagagtctctgtcttttgaagctgagtaaatgggtattttccccatttccactcctgtcttccctgccacagtcattggctcagtgccagccttgtgaatgaacatttctgtttctaagattcctttctgaaattgcagctccctgtgggaggaagcacaccttccccagtaagagtcagaaaatgagtgccctagtggaagcccatgtggccaaagagaaggcagtcacaggagagaggaaagacagactgacaggagaggcagaaggtcccccaagacagtgccccccacccccacctctggctgtgctgctaaagcaagctctcctactggtagattcttaaatgtccaagggaatattgcacatggggagtaatcttagaaatagctatgttggtttatgctcagtgtattaaactcatgtctcaccttagtttgggttgctccagcccttgaaatgtggagtccagatagtttatctgggaggcgatctcaggaagccccactaggggaatggggaaaatgagacagggaagggaagagagccaatagcggtgccatatcaaggaggttgccctgaggacagctgaggctcactcctgctggggatctctgggagatggtgtggaagtggccctgagctttccttactgaaaggccagaaagctggggcatttatccactaactcccatcagtcattagctgaggcctgctctggggggttgtggcagttctagcctgccctcggcagagccagttagactctggtggtcaaaggaagcccccagatgaagaatcaccagtggcctgttaggaaacaggaatgcccagaggatgtagcggggtgggtggcagtgtcagctatgtctatctaataagcaagactttgaaaaccagtttttttttgagcatatcaataatgattatcaatttgattgattaaattccctgaaactatttaaattccaatacaaatttattatgactaattgcttttggccacttcacacatccaccttaaatagcagacaatatatacaaaaaaagttgcataataacaagatttaataatacatttagacttaaacctattctaaaatactaaatatcatgggttttaatttattttgtcattgtttctgttcttgttttttttttttttaaaccttcctgaggccattgttttacttctttcaatattttcttagggctaacatcattttgacacctttcagacaggtgcagtcatctttgagatccaaaagagaaaggataccttctctaaattgctaagattagaggatgtgggttacataggttcttggttgggtcacaggaccctcagtggcttcttccaaggtgattcaaacacaggactccttatcactgtctttagcactattaaaaacttatgcattctttatcaatatttcatcatacatagctaggccatgtagagatctcctctcctagggaatcagaggtgacattcaaatacttggttttcctctttggctctcagactagctgatcatttacacacactctgccgacgctgttccttgctaattgtggatgatagctaatgctgacacgttgctgcccaactctccacttgattgctctacggcacggatgctaagcagtccttctccaggtcctgaagtcctggggtgacctaacttacatgttctttagttattctttctaacataacagaaaacttttaaatagatatctaattaatacctcctaaaagaaaccacaaaagttttggtagataaatctggtagctccccatcttactaataagtagctacatttgtgaagagtgcaattgcagactccagactcagactacctgagtacaaatctcagctctgccacttagtagtgatgtgatattgagcaagttaattaactgtcctatgccttagttggcttattggtaaataggaactctctctgtgaagtggcatcctctccatagagttgttatgatgattaaatatgttaatacttaagtgattagaaaagtacctggctcatggtaaatgccatatgtgttactgtttctttaattgcctgcgtcccagggactcttttattgtcattgataaatattttagatttatagctatgtcccataatgaatcactctttctcttttgctcatcctcaaagttggagactatcatcaaactcagctgtgtgataatttaacaaagagaatttcacctttaggtgaacatgagcagggattgtacaagccaggtcctactagcaggccatagggcccagcagtcctttgcctgcagcaacctgaaaggttcatcctgggagggtgaggctggacgtgagtcttataggctggcaatatttcagcttcttttagcagttggccccgatatttgcagaattcataggagtttgggattcatatcaagtcttagagtttaagtgtcataagctgatggtcttgtatgatgtcattactcctattatgtattctggctccatgcccaggcagtatttggggatttattgatcatgcctgtgctcctcttagccacagtgctgttggttttaaagaagcaacccttagtttcagattgaagagccttggctcttacacatgtcctcagttagtccagttcctagctgttccccaagaacactttagctgttctgcttcttgagctacgggttcaggactgcatgacatatccagcactgtgctggagctgcttcatactggttaatgaaagcggaagacatgcatcacttctcaggtctccatttggggatgtcatgttggtcgcttgcaattagctatggaggaggtcttgacaccacagaaattgacatatgtcacaatcagagctttttaacctagggattttattgtcaaaaatttactagtgcaccattagtgttatgtaactctgcagttatacctaagggctttgtgtttttaccctgacacctctgcttacaagcagagtaactctgggcaggtaattctacccctctgagcatcagtttcagcatttgtgaaatagggataatccctcccacttgaaagaaactttttatgattaaataatagatacaaaagacttagaattgtgcttggcacagtgcgaaagatggacaaatgttaattctttcttaattactcaaccttttggagacttcggttctgactcacattctgccattatctgtgcatgaccttgggcaaatcatgccaccaacaacctggactcggttagttcatctttaaaaaagggagaaggcttagatcaactctgagattattaccatttttaatgtttgaaaactttgttgaaatgttgaaatcgtattaggatcctagacagttaagggaacaccctctacctgatcctgggctcggagaaaaggacaggccctttcctaggtcatggctgacactctagaacccttcttcttttcttttaaaacagagaatatggattattttagtccctggattcatcatttgtgcttacctgggtttaaactcattagattttgaactccctcctccctctgccccaaatccaaatgacacagcagactcctaaaagcttgctctagcctggccctgtcagactacattttcatcaaccaatttaaaatcttcctgatcccgctgatgagtgagaacatgcggtgttcaggggacataaacatgggaacgataaacactggggattactagatgcgggaaagagggagggggaaaaggtctgaaaaaccacctactaggtactatgcttattacctgggtgatggcctcagtcataccccacacctcagcatcccacaatatacctttgtcaccaacctgcacatgtgccctctgattctaaaataaatgtgaaaaagaaaatcttcctgataacaaaaatatgcccattcttttttctttttctttttttcaaacaattttttttattagctcaacttctggagaagaagaaatattctccatttccaatatagaaaatgttcttaaaataacattgcaagcatttatcttcataagctttctgaaactctgaacagatttcgttacacttttctctgtcggatatactacacttacagctcaattcaaaagtcagaggaaaggagtcaaatgtcttggttttgtccatcctgcatttaatgtgtgttgtgtagcacctgagcctctcagtgtgtctgttatgcattcttgcgactattattaatttttctgtgtaatgttggagcggcagcaccaggcactcggctccccacatgcattttatggaacacacattcagtgtatgtgctacagcccccgagctgcccacacccctgggcctgaggggaatggtgggggaggtgaccgccaaacattcgtgacataatttccaaaaaatgtccagaagtgctgcacattttctcccttcgtgaaaggcacatgtgcctcccaagccattgggttggtattcgttacacatataaacacaagggggtggtgtttgaaagcaggaaaaccatggaatttgcttctcaatcccagaagcaatcttttttgtagcacagtccaggcagcagtctgaggctattctttgtcgttccactgtagtcatattctgcaagactaagaaggagatagtcttgatttattgtatcaaatcggttaatttaatttttaaagacttttcttaaatctgtcccacgctctctaactctcctcttactgcccatgttcaggctctcatcatcttttattttttaccttatcaacttagttatttattaacttacataaataagtttctgttatttattaacttacataagtaagtgtttctgtttaagcatataatccactgagttttgacagtgtttatacccatgaaataaccactacaatcaagatagagagaatttctatcaccccaccaaagattctgtttcagtttgcaacccagctttccattcatccctaggcaattcttgatcttttttttctgtagatggtgagtcactttttatcacttttggtcactatggatttccatttagtgggaatccactgtatgatttgcatttctagaaatggaatcatatagcatgccctcttctctgtccagcttctttcactcagcataatgatttgaggcgcatctaagttgtatgcattcccttttgttgcagagtggtattccattgtatgaatatatcgcagtttattcattcagctgacaaaatacatttgagttgtttccagctctgggctattgtgaataaagctgcagtgagcattagagtacaactcattatgtgaagatagttttagttcctcttgggtaaattcctggtagtggaatagctgggtcgtaaaaggaggtataagtttaactttttaagagaccgtcagtttttcaaaggggttgtagtattttaattttccagcagtttgagtgtaccagtgtctccatatcctaacccagacctagtattgccaaccttttaaatttagccattcagtgttatagcttttagaatttgtctagtaggttttctggctttgaaagctccaaaataaaaataaaaacaaaagaaaataaattgagccatgctaggggatatagagtgctgtctcatgtggttttaatgtgcatttccttgtcaactggtgatgctgagcatcttttcttcttttcgagaatcttttcatatgctttttgccatttataagtttcatcttttgaagtgtctgttccaatctttagtccgttgttttattgagcttttagttttcttactattgagttggaagagttctttatatattctggattcgagtcctttgtcagatgtatgtgctatgaacattttctcccatcctgtgacttacttttttgttttcttaatgatgtctgttgaagatatatatatatatatatatatttttttttttttgcaatggggtcttgcacagatacccaagctggagtacagtggtgcaatcttggctcaatgcagccttgacatcctgggcttaagttatctcctacctctcagcctcctgagtagctggcactgcaggtgcatgccaccacgctcggctaatttttgtatttttagtagagatggtttcaccacgttgcccgggctggtctcgaactcctgagctcaagtgatcagcccatgtcgggttcccaaagtactgggattataggcatgagccaccatgccaggccctgttgaagagattttttatttttggttttcaattaaccatttatttcttttatgatttttgtcttttgtgtcctgagaaatatttgcctactacaaggtcacaaatatgttctcctgtgatttcccctaagaattttatggtttttacttgtttatttagttgatccattttaagttgatttttgggttttgtgtgaagcaaaggtatcaatactctttttttctacacagatgcccagttgtttacttttaatgtctctttaatttctgatattatttgtaccctctttctctccctatcttatccactctgtgtctctgtctctctttctctttctcttctttaaccagatagtgggttatcaatttttgttgattttaaaaaataattaaaatagcttttggctttggtgattttctccattgcttgtctgctttctattttattgacttttgccctgatgttcattacttccttccttctaattatttcgggattactttgctcttctttttctagcttcttgaggtagaacttaggtcattgattttagacctttcttcttttttaatataaacctttaaagctataaatgtccttctaatctctgcttcacctgcatctcacaagctttgatatactttacttttattatcttccagttcaaaatatttcctaatttcccttgagatttttctttgatttatggattatttagaggcaggttatttaatttccaaatagttgaaatttttgttgatatttttatttctaatttaatacttttatagtcagagaacacagcttgtatggttttaacttttaatttattgggacttattttatggctcagcatatagtttcaattaaatttttgtgaaaaaatatatattttgctgttgtgtatatcctacaaataccagttgggtttaggtggttgataatattgtttagataactgacatttttcttggattttgtgtaattgtcctatcaattgccgagagaaaggtgttataatcccttaccatggttttagactgtctctttctttgtttttactttgtgtattttgaaactctgttactaggtatatacacatttttgttatgtcttgatgatgaattgatctttacaatatgaaatgttggtccctacctttgtcaatactctttgtcttgatatctattttaactgatatgaatgtagccatttttaccctgttatatttactgtttacgtgctatatattattccagccacttactttcaactgatttatatctctgtatttaaagtacatctcttatagaaaatagttgggacttgcttttttatacatagttatagtctctgccatttaattggagtatgtagtttactaatatttaattatatttatatgattggatttagagctaccatttcattatttgttttctgtttgttccttctggtttgttttgcttattttgcttgcttgtttgttttgttctcctttttgccttttggattatttcaattttttaaaaataccattttaagttatccattggcatttttgctgtgtctcttttctctaatatgttggtggttactctaggtattgtagtatacatcattagctgttcactgtgcacctagagataatattgtaccatttcttttaaaatgtagaagtcttgccatgatatacgttcatttaccgctgtgcctgtggttataattttatatgtattgtatctatatacattataaaaccatgatacatgattatcatttttgctttaacaatcatatgtactttaaagaaattaagagaaactagattctttcatatatactctatttctgaaggtctgagtttctctctgatgtcatctcgcctcagcctgaagaaattttatttagaattttgtgtagtgcaggccaggtggtaaaacattctcttagtttttcttatctgaaagtaaggtttttatttcgccttcattattgaaagatatagagctctaagttgccggtttatttctcttggtactcattgtttctgggttccatggtttttaatgaaatatctgtagtgattcaaatgattatgctcctgtatataacaggttgctttcaagatttttcttcatttgtggttttcagaagtttgactgtaatgtgtttctctttgaatttatcctgtttggggtttactgagcttcttgaatttgtaaatttatgtctttaactaaatttggggagttttcagctattatgttttacagtaattttctgctttagttttcctctcctctcttcctttgactaaaaaacccgtatgttaggcttttcaaattgcttcacagttccacagtgctccatttattgttttcagtcttttgtttatctactttcaattggataatttatattaatgtattgtaaaatttactgactttttcctttaccatcttcagtcttaagtccatctagtgacttttaaaaaaaaattcaggtattgtactttcctgttctaaaattttcatttagttcttttttgtattttctattttttttactacttcattaattgtaagcatatttttctttgtctgactgatcattgttatgatggctgcattaaagtctttgtctgaaaattccaacatcatagttacatcaggattggtgtctgttgattctcttttcccttaggagtgggtactattttcccgactctttatatgtcacataattttggattataagctggacattgtgagtgctttgttgggttcttgttttaaaaggcaatgaatttagccagacccaactacatcctgcctgtctgtgatgctgatggcagatctcagttcagttctttaaacattagctgcaaacttctttcagttttctccagacatgcatggttcagtggtctaccagagacttgaactgagtctgtatacaagaatttagtgttttcccccaactctgactctcctcttttgccttctcccctactgttagtagccctggcatccttctccgggtttcttcccccagaaagatgatctttctgttaatattttactttatctctactgccaccaccatgactgtgctgctctcagggcaaatctgccagcaaaaagaaaaataataaaacacggagaatatagagaactgcttgccacatgcttcaagtttcacctcatctccaaaacttgcctgtctttgttcacttctctagagatctcattagttgtttctaatctgttattcagaatgtacagctgtgagttgcagcaggatcagtgtgttgagtgcatactcctctcactgcaagtgcagcccccactctttagctgaataattgcagtggtcttcctgctgtctttagtcttattttcctccaatccagctttcacttgggagccaggtgattaaaataaattctggtgctgaccttgctattgtaagattgatttctaacttcttgtagtggcatacatagcctttcattaataacttctacacacctgtgtaatgcaataaggtgccttttctcaacccagtgtgtttccacagttctggaatactcatcacctttgatttttcttactctctttcccttgcctaactccagaaactccaccgctgtccccattttgagtcagatgtcccctctgagttccctcttaatattctgtggatccccctataatgttacttagcacatcgttctattatttgctgctcagttatctgtattcccccaagaccgagctcctcaagggttgcaaatcatgccatatttctttaacttctaactcttccctcacctaatttcactgcctgatatatagtagatatacaataatttttctactgattgcattatattctcatgagtatacattttttatttctgtttctatgggtgtctgttgtgcacacacagagttcccatgaaatagaacaaaggatttggggtcatttgtcctccattcactgtgtatcagttgcggcatatttgctaaccttgtcttttaggccccctacctataggtattagacccagcatgctgtgaaatccttatgattaaagtctttacactaagaagggataaggcgatggtattactggagtatccagcaaaggcaggcgtcttctgcctttctctttttttataaattggagagttcagacattgctggggaagctcactgtctctttctctctctctctctgtctgcacgtgtgcgcatgcgtgcatgcgtgtgtgtgtgtgtgtgtgtgtgtgtgtgtgtgtgtgtgtgtgtgtgtgtgtgtgaatgctgatgactctccgggaataagccagcactggggatgaggtgatagattcagaacccatcgatctgtcatagcatgtcatctactaaggaatctggaaagcattctcttcctttacaccatttcttatttatcagaaaggattcattgacttttacattgtacggaacatggattttcacaagaactgatacgttgctccttggtatcaacctttcagagcgggagctactgaatgtttaacccacatcctttctttcaaaacaaatgagcttctgtctccatagaacttttaaactttcttgtgttacctagtgtcttagaatagtgcctcagcttcagctccaacttaaagaagaaaagaacaaatggtttcatttctagttatgcaaataaactgctcattgtaaaatcatttataaatttatttatttagcaaatatttatcttgtatctgctgcatgccatgctttgagcatacaaccaggaagatagatatgatcactgcttcatgaacatttagtctagcgttactgaaaaatatatagaagcactttttaaaaagcatcccagaatctcaatacgcagacataaccactgttcacttctttctgaatattttttttttggcatttttgcccttcggatttcaggcaccagcacttcgtctattttcatttcagtatcttcaacttctttgtctattttcattttggtatctcttgcttctttgtccttcatttcccccatgaggcaaatctccaattgctgagcatctaatctttaacttatgtaatgtttggctctggcccgaaagaaaaaaaacttttcagaatgtgaattttaatcccaaggagcttgttctactttatatgtgtgagattctgaattttccacacctacgaaagactaattaagttatagaggtatttcccactgttaaattaaattaacagacttgctcattttatagtttaatgaggaggtgttaaaagttgggctgtaccttatttataatggcaaaaacgtgataaatatctaaatgcccatcaataagagactagttaaataaataatgtatccatagaatggaatactattaatgagttaaaatagtttgttgacataaaaagaaaactaatatagatggaaagatagctacaacaaattagtggctgaaaaagcagattataacatagattacaatattttgttttcatttatgtaaaattggatgcacatgtctgtacatgcatagcaagccatttgtatgcattcagtcaatctatttcttcaacaactattgtgtaagtgatgctctgtaaatacattgtgatagttgcccatgtcatggggcaaaatcagataatacatataaattgtatcatgcatatttgagggggaacatatttgacttactgaaagtacctttttttctcatctccagaataatgaactacaaagcaggttggactatttaacagaaacccaggccaagactgaagtggaaaccagagagataggagtgggctgtgatcttctacccaggtatttaggaatttcctgatttttttttttattcaaattcctctttggctgaagaaaatactttactaggctgttcttagcagaattgcattcttcctatcacaaatatttctgcaaagccgagtggtggctgctgagaggcttgactggtttctgtaggaacaggggcattgtgcagggtggaggggtcagcaaaggagagacctggggaagccatttagagagagatgggccctgtcagtgagtgaatgcatttgttccttccttccttccttcattcattcaactaatgctcttagtaccttccctgtgccagacagttatgacacagagaggagtgagatttggttcctgccccagagtacagtctggagggagagacaggtatgtaggtagacatatataacggtgtgagaggggcatccgaggtgctttagtgatatacaagagggaggatctaaaccttgaacaaaagtcatctgttcctcagtactgtaacagggtattgtcaagcactggatccagttcataaatacctgatctgcttgagtcatcggcagatatgtgataactataacctggtttgttcagttacattcctgagctagaggactgacctgttcattgttaagctgcttccatgcttgcgtctcttcctggtgacattagagcctgtaacacagtaacctgcctctgataactaactcaccattcccgggtgctcacaactgtgcctggcctcaagaggacataaaacaagtttacagcaaagatgctaatgacatgtgacttgtgatttaggtaatcaaagtcacaaaatgcctggtatcgtgtgtgcaggagggtggattcttgtgtgaacaggggcacttgtgtgtgctttgctggacatagtagtctagaaaaatgtcgaatcctggaatcttgagtggttacagctggtgggaagtagtgacgagccgatcaccaagctggggtgtggaatacctggttcttgtcctaccagccagcagcaggatgccttcagacaggttcttcactggggcctcggtttctcaacttctaaagtcagtgatttgactaggtaactgctcaggcctctaccagctctaacattgtacagtaaggcctcctttccttactttattaatttttatttattactggtattgtcatttttgttaattaaaatgaatcacttgccattctcaaagaatttaccaaaagcggcattaggttctttctttgacagtgtcctcaattacattgcttgccttctagtaaaaaggcattttttatcagtccaatataattaatagaaaatgttgaatatatatatatgtatatatatgtgtatatatatatatgtatatatatatatatatatatacatatatatacatatatatagactccggatctcatcatattcagatatattttcatatatgaaaatataaccaaaaagaacgatcaattgtgtacagagacctttttgaaatttaaataatttggccgtttcccccctttttgtatttttcaaaagccaagtggcctagtccactctaattgcccacataataaatcttgtttggctaagacgggtacaaaactatgtctgaaaccaataaattgtttgttttctaattcccgcattttggcttaaaacaagcttttcaatttgtatgcccaagtatagcctgaagcaaacttttatggctaagttatgaaaccacaaagcggttttcataatggaagtgctgacagacccttaacttatggccatggtgaacttggaagccacttcagtatctaaaagcagcttttccataaatgtaacatttggtttccccccggatccatcttagcagtttaactacctaggtcaatcagcagaggaaatgaaaactacatatccgtgtttccgaaaaggcagaataatatttcattcgtttcctcgcaaatatttattaagtgcctactatgtgaaaggcgccagggaagtctgggtggggaggagcccagaatctttcggtaactcagggcagtggccttccacctgcgcttcttggaactgccttactctgagctggggctcctggagaggcttcgggatgcccggggggatgaggagggttagtgagcggctggaccgtgggacccttcttcctccccaaaacaactgagaaagtcagcttttagtttgttttgtctgttggattccaagtaagattctgtttgaataaatagctctatgggcaaaaacaaattggaactcccggtctagttaatccccatgttttatggatgccagaactggggctcagagagatcaagtgattcactggaagccacatagccagaattagaaccaggccttcttgagtcttggtgcagtacatgtgtagtttgaaaatatgtaataaatagagagctactaaatggtggtgtgtatgttctaacaaaattcctggttcatacttggacttcaaatttgcatctaactaataaaagattccatggtattgtccagaatgttttttagatttttgtttctagaatgttttagaccaatacaagcattgaattaagcctgagttatgcagaagcgttttgttctttgtccctattcttctcctacaaggaattcaccagtgtggaacagtcagggaggctcaggctgtccagttccctgcccagccagctgctagctgagctcagccttgggcaagttacttcatctctctaaagcttcaactctttcatctttaaactaagaatgaagaggataatatcaaacctcattgggttgctttgaagattaaataaaaatgtgtacataaagcatttagagactgggcatggtgggtcacacctgtattgccagcactttgggaggccaaggcgggaggatcccttgaagctaggagttcaagaccagcctaagccacatagcaggaccttatctctaccaaaaaaaaaaaaaaaaaaaaagaaaagaaataaaaaataggccaggcatggtggctcatacctgtaatcctagcactttgggaggccaaggcagtggattgcctgagctccagagttcaagatcagcctgggcaacttgatgaaaccctgtctctactaaaatacaaaaaattagccgggtgtggtggtgtgcacctgtaatcccagctactcaggaggctgagacaggagaatagcttgaacccgggaggcagaggttgcagtgagccaagatcatgcccctgcactccagcctgggcctgggcaacagaatgagaccccgtctcaaataaataaaaataaaaatgaaagcattttagcatggtaactggaccagagttaagcacttaataactaatagctattactattaatattaactaaacccaaactctgattttctatgtagaacactatataaaatacaaaaaaatctgagtatgctaagatgatttcattaactttttattggtggtaatcattgattttatgaaatggattgatagcctgatcaagtatatagtacttcagtatgcattgggctcttcagttaaactctctagacaccccgtctagacactgtgtaaaactctgggaggcccagtgattgataaggtctctgtcagctaagacctgagagtggcccctgcgtgctgtaggcatggggcacttgtcttattgtagaatagcatggcctctcctactcactcatctgtacaactgcaagtgttacatgctgtgctactgctaatagcatttttagagctgctctacttttttttttgtcttgtgtgaaaaaaaaattgcatttagttgccgggtgtggtgtctcacacctgtaatcccagtactttgggaggccgaggcgggcggatcacctgaggttgggagtttgagaccagcctgaccaacatggagaaaccccgtctctactaaaaataagaaattagccaggtgtggtgacacatgcctgtaatcccagctactcaggaagctgaggcaggagaatcacttgaacccaagaggtggaggttgtgttgagctgagatcgcaccattgtactccatcctgggcaacaagagtgaaactccgtctcaaaaaaaaatgcatttagttgatgctcaataaacatttgttgggtgaataagtgaaagatacataccaaatgaagaacataggcaggtgatcagtattatcacatgatttatttatttaataaaggccttggatgaagtcattcctgcttatgtttcacctctttgtgtgtgtgtgtgtgtgtgtgtgtgtgtgtgtgtttctctctctctctctctctgtctcctcactagaatatgagctccatgagggcagggattttcatctctttcactaattgcattctccctgggacctccttagagcaatgcttggcacatactaggcactcaatatttgttgaatggagccatctccctgtagcatttgacaatccttcctaagaagaaaggaaggattcctcagcctatttcctacccttgcaggacttttctctcctggttctccacctgtctccctggtctgtccttctccagcttctctgatggcttcttttcctcctccaagaccctcccatggtagtccacatggctctatcttggttccggtactttctgcaaagattacatcaagtctcacagcttcacctctcccctctgtggctgagccacagaagtgtgaacctttctcttgaatacaagtccttgttccccacagccttctgggcacactcccagctggtgtctgcttggtcttcatacttgccgtttcatggccgagtgcgccatctctttcttcaaagtctctcctcttaggagtgagtaagaatactggcttggaagttagacctgggtttgggtcctgagtccgcctcctgctttatctgcagctttggcaaattcctaccctccttgattctcatcttgaaaaggatgattttggtggcaatccctttggaagcttgttgagaggattaagggaagtaacaggcatagaatgtccagtggaagtgccccgccttttcatatttctgtggctgcagccactgctttcccagctacctaaactcagtatattgcagtcacttctgagtcagagaattattttgctccttgactcactcactcatactgtgctgttcttttccttcatgacttgactccttctttcccattcctcttgctgccagcctgcctcagactgtctaatctactcagtaccatctctctgcctcactttctcctcctcaaattcttcccctccttcatctaatctttgttttccataaatttctagtgaccaaggatctcttcataaagagagagggaaagggaaggggtgagaggggactcactgtgggttcaggagttcacacacacacacacacacacacacacacacaaatgtatgtgtgtatttaaagactcaggagtttagtttgaaaactttgatatatgttaattaaagccattgagaacaagtgcaggtcatctagccttcatttacaaagaaaaatgaaaaaacaaaaacgaaaggaaaagtgacttttctttcttctgccctgtagtgaaacttggtttccagcaaaccagcaaacttggttttcatcaattatgtcttaataggtgcaatatgatgaaaaatattccccatggtcataagtgctcagcacgtagtaagtgctttaaaatgcttatattttcgtatttcttttgcaaagaccagaacacaaagtagctttttgtcaaagctttatttgctgattctgctattgttttccccaggggaactgcccctttattgattaataaaaggttaacaatagcctaaatgtgttaaggcaaatggttgggtttcagttttgtggttgaggttatttgtgttcttgaaatcctgttgtttcctagtgatcaacaaaataaaataccccacttcttttttaaaagatcgggatatgagagcctgtttttgaacctagaaggttcacctttataaatatttctgcattttatgggctttcaggatattgtcattggagactgtttctgttatgcagaattttcacaggagttggcacaaatagccatctggcttctgcccctggcattccactaaactgcctggtcaggtcagtggggcctcctggatcaccaggtcccatggattgctctctgtggcaggtgacactgggaccacttacttcttgaaactcctccaacctttggtttcctttgtaattcatatgtggggtaatagctctgtggctggcttctgtgagctgctggattcatggagatgacggagatgtggctttcacccttaaagaaattatacctagcagtggacacaaatgtgtagaccaacaagtgcaataagatgctatagaggcttggcgtggtggctcacgcctgtaatcccagcactttgggaggccgagttgggcggatcatttgaggccaggggttcaagaccagactggcccacccagtgaaactccgtctctactaaaaatacaaaaattaaccaggtggtcatggcacgcgcctgtaatcccagctacttgggaggctgaggcaggagaattgcttgagcctgggaggcagaggttgcattgagctgagatcgtgccactgcactccagcctgggcaagagagagagatttggtctcaaaaaaaaaaagctatggaggtgtcagaagcctgtataatagtgatgttcaaggtgtatatggggattgggtggagaatatggagaatctcctgggggagacatgcaaagtttaaaatacaccccctgccatgctttttaatacatcctctatcacctggtgaatgactggatgtgggaagttaggggaaagggattcgactcttaggcttcatatacacattttgtcatcgtgttggttgggataaggaatgtagctatttgaaagaacccacagatcttggtggcttagcatggtaaagattaatttcccatgtcagtttaaggccgtttggtataggtttcactccacacagtctttcaggaacccaggaattcctccatctagcaaccctgcctgagctttggagtcctcctggattctccacttgtatgctctacataaaagggaagagagagagagagcgtgggggattatgtagatttttatgggttaaacctggaagtagtagaagtcatttctgcctgtttagtcacatggcccacctaatggcaagagaagctgggaaatgtagttgagttgtgtgtccaggagaaaaaagaaatgggatgtcttagtcacctaatcctgttaactataactctcaaatgtctccctaaaatctccccgccacttcccatcaagtgcttccgtcagaattcaagttgtcatgatctctctttcacctcctgaagagcaagaattttctaactgacctgccttcagaataatccttccctagtcaaccctcgatagtaccagaggaatcttgctagaataaaaatatgagcagatcatggccctccttaaaaacctgctgtagttccctgtccccttctgaactccttagccagggacatgggacccttctccaccaggcctcatcttctgccactctccattgtgaactctttgttccagtcgttccaaaggagcacatggtttgcagttccacatccacaaactgtgtgctcacccatctctgccttacacatactgccccttcttcctggagttcccatccccgctttgcccgcttgatgagtgctaggcatccttcaagattcaccttctctgtgtgaatttctagatgtgaatttcctggtggtgctaaattgttctgccctcaattttcccatcatgtgttcatgctcattttgttcaggtcatggcgggaagggaggcttgagagttaaatgaagggactgttgtggatgtttgggcaactttaagggaaataaacaagggacagtggcaggctgtggaactagcaacagtggaagctgttaccacccttgcctgaggaggcaggggagaaagctggggaagataacaagttggggagctgtagctatgggccctggtagagggatgccgccaactaccaagctgcagcctggctgggaaaggaaaaatgtcccgacctctttgtcctctcattccctgatcccctgctaccaccttgcagtaggccaaaaggaactgaatttgaagggcaaatggatgctgacttttccgggccacagagtagggtggagaaggggcagagtagggctgaatggcaaaagaagaatgcccagcacagctgttatgtctctgttatagttcctaacacagtacatgaaaattttttatgtacatatctttcccaccaggtgacaagtcccttgaatgcatgtttcatatttttctgaaccatggatgcctagtacaacctttacaggttgttaaaaataacttttttatttttaacctgtcgtagtctgttctggctgccataacaaagtaccataaactagttagcttataaacaacagaaatttttttctcacagttctgaaggctgggatgtctaagaccaaggtgccagcagatccagtgtttggcaaggacttgctttctggttcatgtatagtgtcttcttgctatgtcctcacatagcagaagggatgatgatgaatatttctggggcctctctttttttttttgagatggaatttagctcttgttgcccaggctggagtgcagtggcatgaacttggcttactgcaacctctgcctcccgggttcaagcagttcttctgcctcagcctcctgagtagctgggattacaggcatgtgccatcatgcccagctaattttgtatttttagtagagacagagtttctccatgttggtcaggctggtcacgaactcccgacttcaggtgatccccctgcctcggccttccaaagtgctgggattacaggcgtgagccaccacgctgggcctggggcctctctcataaggccactaatcccattcatgagggctccaccctcatgacctaatcacctcccaaagtccccacctcctaatacatcaccttaggggttaggatttcaaaatatgaatttgggaaaacgtaaagtccattgcagggcctgtttgtaatatttaagtgaaatattaagctgcattattgtctttttatttttaaacacttaaacaccattttctagagttgtcttaccatgtgaagcatatggggggttttgttttgtttcattttcctgacctgcattttctcatttctcagccaaacaggcaggactcgtgaaattgtgatgccttctaggaactacaccccatacacaagagtcctggagttaaccatgaagaaaactctgacttaggcactcagaggcatacactttttacagatggacaaaagctctggaaccctgtggcttcaaatcctttgggaagggtgactgttgtttcccctacacacagtgtaagccggaatgggaatcgctgaggctctgatccacttctaagacaggaaggaaagtgaaggcagagtgagcaggtaagagagggatatacaaggtcacatttcagacacccactcggcataccctgccgtactgcatcatcatttgttttctttgtagacactgaaatcctatcaggaggattccttcacaatgtattttatttgctagactttggttgggagggaaaaggacattaatttgaagtttcatgttattcatgccaggattgtttgatagagcatgaaggttttgtttacccataaaagtattagaggcagcgtttctctgatacagagaggcctgtccacaagaagcatgggcacccagccaaacttgaacctggaagggagggttcccggcctgcaggtgctctttcctcttggtcccaagcatctgtgcagggtcgtgggagccacactgagagacttgtgtgggccagacaagcttcattctgatgcgctagtcccttggtttaatttgtgccttatgctttcattggaccagctgaaatcactgtatttattcaactagtgatttttttttctttctcactttaacttaaagagaattttatatgtcttggaaatttaataatttagtgttctcagtatcaattggtgtttttgttaaacgaatgaatcatctgttcatgcatgctctactttgatattataacctatgtcacatgtgtttaataaataccatatattttgttctactaatgttgtctctctgtttcatccatgaccatgtagaaggggcagagagcagatcaggctctggaatgagtgtcaaagtcaaatcacatgatcttccagccagtacaattcatacaagcatctgtaaaccataagattgactgtgtgtgtcgggggagggtggggggcctatctgtctttttaattgctgaactttagttaatacaccatgtggaaaaagcaagataccttaatgatcacaaagtacaaaaatagattttacttttaaacctttcctcaaacctcccaccccttactgtctccacttccaaaaaaccaaagaaataaaaaagtaagaaagcaaagcaactcagttagataaatcactgtgagtcagaatcatgctaagaggaaaatgtgcatttgggagccacatttgtatttaaacactgtccgtgggaccttgggcgagtcgtcaaggctctctgaatattagtttcatcctttaaaaacctcggattatcacacctacttgataggctgacgtgagtgccacatgaggtcattcccacatagggagtgggcactgctaggcacacaggcagtgattgctgtcattctggaggttttagagcactgctgattgctggttgagtctcaccactggaggtattctagcagcaaaaaaccgtgttctgtggcagccaccaagaaggagcacttagagaaaaagctgtccttaggaccaggagatagggaagctggactcagagagaggcagagggttctgggagcccatccccctgaagaaactggtctggaagcagtttctaagtgaaatgcaatgacttaaaaaatgtcaattttaatgagaccaaggtagaaatgaaaactactctgccaatacttccacattcacttctttctctctctcttaaaacaagcaaggaaaagaaaaacttagtaattttaaatttaaaggataccagggaccattctgcagctcgggcctttgtattttaaaatatatcttcaacatatggaaaattctaaacatgatttgaactactcaagaagactattaaagagagttcctaaattgtacagactgaaaccgaaagaagctgagagataatccttccagatcctttgtcaacattgactctagtgccccccaaccctccatctaaaggactgacattcatcaacctcttcatgagcaggggtattacataaaattgggagaatgaactctaacatttcatagtaaatttatctcactgaaatggaaagcagcagtgtatgtaaagggtttttaaaaaataaaacaacatcctataatcttccaattaatatcttcattccagaccttccagaattttaaaacacacccgctccattttgtttttaaaataaatataaccctatactgagaagtggaatcatgtgatttttaagaacgtgggaacactcgagtcagctatctgagcttagtcactagtgcgcatgtgggtaagtcacaaccctgtctgagggcctgtaaaattggaactgtgagagttctttcctaatggggttggtgtgaagagtaaatgagttaatgcctgcatggttcttagaatagtgcttggcacatgataagcacttaatatatgctacctattaacattacatacttttgtagccactttttgcttactttatatatatataaatatatatatacacacactttatatagtttgctttatatatatactttatatatagtaagtttgcttactttatatatatacatataatatatatttttgcttattttatatgtatatatactttatatatgcatataatatatatgtatacaatatacataatatatattatacacatatatgtatacaatatacacatatattatacacatatatgtatacaatatacacatatatattatataatatatgtgtacaatatacacatatatattatatataatatatgtgtacaatatacacatatatattatatataatatatgtgtacaatatacacatatatattatatataatatgtgtgtacaatatacacatatatataatatgtgtgtacaatatacacatatatataatatgtgtgtacaatatacacatatatatgtgtgtacaatatacacatatatatgtgtgtacaatatacacatatatatgtgtgtacaatatacacatatatatgtgtgtacaatatacacatatatataatatgtgtgtacaatatacacatatatataatatgtgtgtacaatatacacatatataatatgtgtgtacaatatacacatatatataatatgtgtgtacaatatacacatatatataatatgtgtgtacaatatacacatatatataatatgtgtgtacaatatacacatatataatatgtgtgtacaatatacacatatataatatgtgtgtacaatatacacatatatataatatgtgtgtacaatatacacatatataatatgtgtgtacaatatacacatatataatatgtgtgtacaatatacacatatataatatgtgtgtacaatatacacatatataatatgtgtgtacaatatacacatatataatgtgtgtacaatatacacatatataaatgtgtgtacaatatacacatatataaatgtgtgtacaatatacacatatataatatgtgtgtacaatatacacatatatatgtgtgtacaatatacacatatatatgtgtgtacaatatacacatatatatgtgtgtacaatatacacatatatatgtgtgtacaatatacacatatatatgtgtgtacaatatacacatatatatgtgtgtacaatatacacatatatatgtgtgtacaatatacacatatattatgtgtgtacaatatacacatatattatgtgtgtacaatatacacatatataatatgtgtgtacaatatacacatatatataatatgtgtgtacaatatacacatatatataatatgtgtgtacaatatacacatataatataaaatatatgtgtgtacaatatacacatatatattatataaaatatatatgtgtacaatgtacacctatatactctatatgtgtacaatgtacacctatatactctatatgtgtacaatgtacacctatatactctatatgtgtacaatgtacacctatatatactctatatgtgtacaatgtgcacatatatactctatatgtgtacaatgtgcacatatatactctatatgtgtacaatgtgcacatatatactctatatgtgtacaatgtgcacatatatactctatagagtatatatatatactctatgtatattctatagaatatatatgtgtacaatgtacatatatattctatagaatatatgtgtagaatatacacatacattctatagaatatatgtgttcaatgtacacctacagaatatatgtgttcaatgtacacctacagaatatatgtgttcaatgtacacatacagaatatatgtgttcaatgtacacatacagaatatatgtgtacaatgtacacatacagaatatatgtgtacaatgtacacatacagaatatatgtgtacaatgtacacatatataatatatatgtgcacaatatacacatatataatatatgtgtacaatatacacatatatatgtataatatacacatatattatatataatatgtgtatattatacatatatgtgtatagtatacacatatatattatataatatgtgtatagtatacacatatatgtataatatacacatatatatgtataatatacacatatatatgtataatatacacatatgtattatatataatatgtgtatattatatacatgtatgttatatataatatgtgtatataattgtatataatggatataatatatactatatgtatataatataccaatagtgtatataatatatacgtatatatattatatatagtatataatatatacgtatatatattatatgcgtatatattatatacacctgtgtaatatatgcatatgttatatacgcatatgtaatatatgcatatattatatacgcgtatgtaatatatacatatatatacgtgtatataatatatcatattatatattgtatacgtacataatatatcatatataatatacgtatatatcatatataatatacatatatatatcatacattatataatatacgtatataatatatcatatattatataatataagtatatcgtatatcatatatcatatattatatatgtatataatatatcatacatgtatatattatatacgtatattatatatcatacatgtatatattatatacgtatatatcatatataatatatgatatatacgtatataatatatacatgtatgatatatgatatacgtatatcatatattatatattatatacgtatatcatatataatatatactatatcatatatatgatatagtatatattatataatatattatatataatatattcacatgcatatatatgtgtatatatataaagtatatatacatataaagtaagcaaaaagtatacatatgtattatatatagaaatatatacatatacataaagtaagcaaaaagtgtatatatactatatatataatctacaccattgcttcttataggtaattggattccattttttgatgtcccataatttatttgacccatcccttagtgttggaatcttggatgttgtcttcacttttcttcagcagtcctctgatgaaccatcttgtccacacgtttttgcacacttgactgattattttctcaggatcagttcctagaggaattgtctggtcaaaaggtgtgcacacttttggtgcctatggtccaatacggcctatggaaatttgaattcattgaaattctcactaacaggctgagaatgtgacttcctgactcttttgccaacatgaggaatgagaaacagagtgtacaacatggctttctttaggcagacctgccccccaaacaggtggtgaacaaagttccttcagcatattgcctgtggatatcagaactcagggacatgcaggtgtgagctgcgggcctggaggtgtccctagggcccagagagtgcctgggcagccgacgggaaactggatggactcagaaggagcaagtgtccctcaggatccaggaatcaaagaaggcctgccgcttagtgagccagcatcaagagcctgtcactcaggccacatgcctaagatgcggtttgactctgagtggggcatgccccctatttcagggatagcctgggagagaggatcaacatttgggaagtgcttggagggtgcaccaaccaaggctgacccctgagctggtccatgtgtccactgtgagcacccactttcttcccagtgaatgccatctgcctactccaggaactctagggtggtcaccagggcaaggagtgggggtgataggaatgggtcctggctcaagtcccactgggccatggtgctcttcttgacggccagactgagagggccagttcagttcacccagcacatgccaggtgcttggaagacaaagaaatgcacctcgagacccttgctgtctccaaaatcttttccagcaagtccaggccctcctgatctttcccatctctgaatcccaggggaacttattttcagccccttctttattcttacatctcatgaccaatctttgtgtacatttattatctctccagtgacataaactcctcaggggcagtgtcccataaggggcacactagtcatttggagggaagccattgtaaaccttgataagcatgaagaaatctacaaatgaggagtattccagaaaaagcctcggctttggggaagtaaataataccaggagttactgagctggacacagcacacatacactgagtctttacaacagtcctgcctggaagatgttatcaccaccatttcatggataaggaaattgaaactcaaaaagatgtgaaaattgtctgaaaccactcagacctgtctgatttcagaacacaggtgggaggcctggagtcagtcccaggtctgccattaaatcacaatacctccttggtcaggtcactacagcactctgcagctccgtgccccaggatgcagctttttcgatgaagtaaatggaattgcatcccccacccaggcttgctgcacagatcatggcatagcattgacaaatttcctagcagttcatcagagatatgccaataattgatacctgctactattactagtaattaccgggaagccagtattgcaccaagaatatttgcaaacccaaggatttcttcttattggacacagagattgaatgaatgctagcgaatggaattgtgcagaagacaaacaggagtgagggaaatgctactggataagcaggaggttaaataaactgtatctccttttgtttagatgtgaatttaagaataatctattttactttgtcagggaaggaaaggcctaaaagggagactaaagatgagttgctaaaaaagagagaacagaagcaaagagaccagaaggtgagtgctgctaaagcttggggtaattcgttaggcaggattagataactaatacatggtgtgaaaaatatcgttgcattttgtttttgcatgcaaatatctaattgttttagcactatttgttgaaaagactacccattttccactgaattgcccttgtaccattgttgaaaataaattggccatatatgcataaatctatttctatactctctatactgttatattgggatctagttgcttatcttgacactaatactatgctgtcttgtttgctgtagctttatcatcggccatgaagtcaggtagcacaggctctctaattatatttttctaagttgattgggctattctaggtcctttgcatttctatatgaattttacagtctgtcaatttccacaaaagcgctattgggattttccttgggactgcattgaatagacaggtcaccaaggataacatcaagaccttgctgtgtcaggccagctcctagcaacactgcagcccaagttgggagcactaggttggctcctggatgtcagtgactgctcttctcttccttagctggaaaggtactgggaaaaacctccatagtgtattttggtaaaggtatagtataatctttgtgggattccgaacaaaatattataagaaacattcatttgtgcccaagggccataaacttggtgtaatctgaatgcaataaattataaataaatggcaaacagttcttgatggttttctcttaatttttcaagttttaacatagagcgtttacaggattcaccttcctgatttagggatgggaggggggttgagaaataattagtaggcaattttttggccctgggacttttcttgtaaatgttttctttggcagccatactcttgagaacaggaagttactctcttgttacagatttaagacttttctgagccaaataacagaaagctggattagttctgaaatgaagtggggggaaaaaaaacaactctaggctcttgctggagattaatgacatcttacaaatattttaattctcccctttcctcttaacttgctacctcctaaacaaaacacactcagactgaaaaaaaaaaaaaaacaaaaaacttaactgatcactttgtagcccaaccttaaaataaaatatctttatggtgcccacaaatttatgtaaacatttttggggtgttaaagggaaggaaaatagggctgtcttaagtcgatcctttttttgttacaaaatccccaatatgaaatttagagcataaaatgtagttgtaaagatgctaatttttctatgataatcacacagattcataattttctttgatctttttaaaatggcttttaaaaatagataaaagtgtttaatcaagctttgaaaactatgcctatatgttgtttgagatggttgcaaacaattctttagaaattgttccaaatgacaggattatatcctttgactagagcatctctgactataaaacaaaggaattatttcctccaaaaagactgagtcctcacagaagggcatgctgaggtagaaataaaaaaaaattaaatttttacacttgattctaaaaaaaagttgtaatcttaatgaagttcataatctggaggaacattaattccgtgaattatctgagaactatttgtgaggattgtttttaaaattgctttaaatgtaaaagtttttattttttgcaaggattcttaaaacacagaaggccttataaaaactttgagattgagaagtaaagaacgctttcctgtaacaagtatatatcttctactagtaatctaggaagtttctatggtattaattgcagcctcagaaaataaaagagttggtctaagtgttttatttgcacttgcctcctgcacccaaattcaaatgccctggtacccaagaagtttgcctatagttgagaagggtaggataatagggccagtagctgatgggagcaggggaggatgcttccctgggctataagaacatgcctatcctaaagtcactcaaattcctaagtctgaaaaacactgtgctgccaaacacacccatctgtaatttgaatgtggccaaagacccacaatttgccacccttgacttgcattatctaatgtttttctttctgtatattatgaagaggatatttattccttcatactaactttcttcagtctgcttgaggtgatgcccttccacatcattcataatagtttcttgtcttctactattattgacaacttcacttttttaaccttataaacaattttaaattactcggagctgtcatccattagatataaaaattaaatggagcccaggaattctaggtgatgggaaacattatccagggctgtaagacatgcacaactatgggagtccagcaaaggctgataagcctggagctccagcaatgttgggtgagcatttatttaaagggagctacttgcttcctggtttgactgcataccaaatatatcttctcaacatttatgagcttaaatagatgcagatgttgccagagagtgtattgtaacattcatcatcctagaatcatataatttaagtgttgagaggcatcttggacttcggttcaatactctcattttaagcaggaggaagctgaggttcagaagagttaactgacttgccacaaagttagtggtccacaaaccctgccccataaaaacattgttgagggttgacaaattttactaccaccacctccgttctctcatctggattgctttaattgtcctatacactatgcttgactattatctcctcccaattttcaagaagaaaattaatgagaatttttttttcctgaataattcttctttatatttcgtgggcatcccttacttctctccatctccccactgttgatgattttcagagctgtgttctttctcatgtaagatggaaattaaaggtgaccagacactgattttggccaggtctagtgagaggagaggggttagtttgttttctctaactctagcctgctgctgatcactagtttatttatttcatggcctctgatggacatcagactccaaatagtgagagccatggtgtgctgacactgtagcagaaatcagttctttccatccactaaaaagacaactacctccttggtgaaacctgaaatgatcttatgaaatctcatcctgtagtgactttgcaaattacctcactcctccttttctgttttctcataaatatatgtgcagactgtctttcctcaaccacaaaggaagtgtaaacatagtttatctgatgttttatgaattaaataatttctatagccagacttatatgatgtacttgatgttttatgaaaaatcttcagtgaggcccatttaagtgtaggacagtctgccctccagcatagaatttgaaccaattctaagcaaagtttggctgttatatcctcctactttcctgccctacatactctccaaatcctagagatgagtactctggggtcttcctattatcctaaactcactgatgtaatagtctgtctggtgtgttcttcttctcagattactcaaaattctctccattttctccctttccctcctgaacaaatttcactctttgggtttaggtcatcatctcagctaggctgttatgaagaagcattttggaactaaataatactcacgtgtaaatgactaatagatcatttatgttctcaaaggaagatctttgttcaccatataatcttcttattggtggaatttcactcaatgtgtcaaagggaaggaaaataagtcaaggagaggggaaggtatttttaatcttgtttaagattttatgtcttaaactgagaggaggggccttagctacaatgtctatatagtctgtgtcaaagaccgtgtgctctttcaaggatttttttcccagtttgtgagttttttcatatttaaaaatcttacaaagttttattattcaatcacaattcagttggtcacatatctaaccagcaatcttcattaaatttattaaaaagtaaacttacatgaaatttcagagtaccaaacatttaataatttaaaaaactatgtcttcccacactatcaagatcataaaacacagtggtggcctgaaatgggacattcgtcactaaaaaacacttcagccatgtgacggtattaacagaaaagggttcttttccaccaacttgaacctcacttggctgagattttctcaccacagtctttgtatttttttttcccatgggcaactgcccccttgattaatcccatttcccttagtcctagtttttccaggcagctgagcaaacaaagatgcaggcagccattttaacgtgcttcctccctcaagccctctgggatgggccgtctgttcatcctgttcataaaccaacggcctgaatgggcttggagaaagcagcaaggatcttctgtcaggattaattttaataggccatagtctgtcacccgggaaccatagcccaggcaaatggctttaaattactatttgctgataaaaagggagatatgagctgaaaatttggttcctcatttaaaacaacttggataactaatgcaagaatttacttttagtgtggagtgcaggtactttacagcctaaacccttgggtagctgaggaaaatcttttgttgccatgggatcacagtgaaatataaagaggggaaatgtggcagtttgtagaagtatagaattttagagctggaagggaaataaaaaatgtatctgtgacttcctaaggacttacgtttagagctttatatttctgatttctgtgcagagaaacgcgattcctcttattgccccttctacttttttgtctccctctttaccaattcctttctctttcctttttttcactgtttttctcatacccaattccagttccttgttccttcccttggttcctcatccctcaccagccaggctcctgtcatttctctgtgaagctctgcactggggggcacatgaggtagcgtggtgaatgtagcccctaggcaaacaagtcaggaggccctagctcttgtctcttcccttgtaaagtgtgagaaggcagtttgggggactgactggaagggatggttttgtaaaatgacacactgatgtcagccattattgttcaataaagtcctctgtgtaccattcataagtaatttttttattagctatggccattgttttggtttgtttaaaaattcagaatgtggctgggcatggaggcttacatctgtcatctcagcactttgggaggccaagatgggaggatcatatgagcccaggagttccagaccagccctgggcaatatagccagaccccatctctccacacacacacacacacacacacacacacacacaaatcagctgggcatggtggtgcacaccagtagtcccagctacttgggaggttgaagcaggagtaacctttgagcccaggagtttgagactgcagtgagctatgattgtgccactgcacttcagcctgggtgacagagggagactctttctcaaaaaagagaaaaaaatcagtgtgttccatactcaaatggatgcttccaagaaaaatcatggaagaaaatagaatttgcttcatacttctttatgacccttggttcccatctcttcctttccagccagctcccctcaactctcatagatcatatcacttgttcatggagaaaatgttctccacattcctttacaaacatgactgataccataaaaaatgtttggtgcaagttctgtaatctttcttaaatagcccagcctgggcacttgagcaagaaggctggtggctaaaattaaacaaaacataacaaaaccaaaaacaggctgggcgcgatggctcacgcctgtaatcccagcactctgggaggatgaggcgggcagatcccttgaggccaggagtttaagaccagcctggccaacatggcaaaaacctgtctctactaaaaatacaaaagattagccaggggtggtggtgcgcgcctatagtcctagctactcgggaggctgaggcaggagaatcgcttaaacccgggaagtggaggttgcagtgagccaagatcatgccactgcactccagactgggtgacagagcaagactacatctcgaaagaaaaaaaaatgcaaagaacaaaaacaaaacccaagtgtcaatgaagatgttgagcaacttcattgctgatagagtgcaaaatggtatagatactttgtaaacaatttggtagattcttagaaacattcatttaccctatgacctagttatcccactcccaagtgaaatggaagcttatgttcatgcaaaaacctatacacaaggtttatagtgacttgattcataatcagcaataacttaaagcaaataaatacctttcaactgtttaatgtataagtaaactcctacaatggactactatacccatagaatacaacactacttagcaataaaaaggatcaggttactgatacctgcagtggcataaatgaatctcaaaaccattatgctaagagaaagaaggcagattcaaaaggctactgtatgattctacttatatgacattctggaaaaggcaaaactctaggacagaagacaaaccagtagttgccagggataggggttcagtggagaggctgactacattttggggggcatgatagaactgttctatatcatgattatggtggtcatcacaaaactgtatgcatttgtcaaaactcagacctgtacactaaaaagggggaattttactacatgtaaactatatcaataaatctgacaaagaaaagaaatatacagtattaatttgcatgttattcattttaaaataaatggtattgttctgcaacttgcttttttcacttaaccttaagttttggagattaaaccttgttgaaatctgtagatttagttccttcattttaattgacgtagttttcaatttttgctaccactataaacaatgtggcaatgaatgttctgacacacgtcttctttagtacatacaccgagtttccttaggaaggctagtacataaatgctgtgtgttggattgcagagtaggcacgtcttccagtttactagatgtgactgcatatctttcctaagtgtttctgccagttcagtctctgtaacacatgagctcctgtttctccaatcagaaagagtttggaatttttaagatttttttactttgcatttccctgaagttgaggatccttttttaaagcatgttttctggtttttccagtttcctcttctgtgaactgttcgtatttttcctttttttttttctgacttgttttgcttattgatgtataagaattctttttgtaaagtgtgagtttttgtattctggatgccagcttgctgtttatatgtataatagcctttacccttctacactacagaagtttttgccttaatgtagttaatttacaaattatttcctgtaaagtttgtaaaatgtgtcttaagaaatccttcctaaacttgtgatcattgaaatgtttttctgtaaatattatttttcaattttaaatagtagtttgttaattcctctggaattaatcctcatgtctattggaagtaggaaactatttatattaatactttttcccatatacacaaccaatctctctagcactatttatgaaaattcactctttcctcactaatcttaaatctcaaatcaagttcccatatatgcatgggtctatttcggtgttctctattttgttccattggtctatttgctgcaacaattatataaaattaataaaatgtaattaaaaggccaggcacacagtagggccaaagcaaaagctagcttcccccactcctcagtcagctctctaaccctaaagtctggtcatcagtgaagtcttggtttttctaaaagaatgatgctgtttggctcccttgttggtgatctttattcccactgacttcatctggtccaaatctctggccagcctctcctttaaattcccttttggtactagctccccactaatcatcaatctgctgcctgcatacccccaacttggcccagtgtcactatggccaagtctaggcatagaggctggacatgcttctgcattgccccataacacccccaccccctcattctccagcaatccccatgtggcggtcgggccatttctcatgctgagaggcccaacaagtgtgaagttgaacactttcagtctttgtacattgacactaatgtatcccacattagtaatccaagtgaaggaagcaaaattaaatttcttaaagaaaaaaaggctgggtgtggtggctcatgcctgtaatctcagcagtttgggaggctgaggcgggcagatcgcttgaacctaggagttcaagtctagcatcggcaacatggcaaaaccctgtccctacaaaaaaattaaaaaaaaatttagcggggcgtgggacacacacctgtagtcccagctacgtgggagggaggctgaggtgggaggattgtttgagccaagaaggctgaggttacagtgtgccgacattataccactgcactccagcctgtgcaacagagcaagacccgtctcaaaaaagaaaaaaaaggtcagaatttaagagaggaagagagggtcgaaggagggaaatacaaattcagttttggacaggttgagactgagaaacctttgagacattcaggtggtaaggcctttaccctgactctaattctagtcccagagcaaaaccccaaaagactcctgtgcttaaaagcctggagagattggtaccttggaatttatggtaagagagagttttaagagggagaaactgctcaacagggtcagatgctgtgagaaggggaaggactaagacatattccttgaatctgacagccatgaagggatccatggtgcttgcaagatggtgaagaaatggagtcagagaatgtggacaattcttttaggacgcgtatctctgaaaaaagaaggcaggtggaagctgggggcagcttttaactgctttattggggtataactgacgtgctatacactggacatatttaaagtatacagcgcaataagttttttttaattttctctttttatctctagaagtaagttttgacttatcaaatgattacacccatataaccatcaccgcaattaaggtattgagcatccccgtcactcccaaatgtttcctcctgcccctttgtcatccttcctcccagcctctccctgacaccccacaacatccgataatcactgatctgctttctatcactatagatgcgttcgtattttttacaattttatataaatggagtcatacggtgtgtaattttttcctggcctctttctcagtatactcgagattcatcagagttgttgcatgtaccagagtattcgatcatatgcacagactacaacgtgtttatccacttacctactaatggattgtgtcaagttttgggctattacaaataaagctgcaatgacacttatgtgcaagcctttctattaatatatgctttcatttacctgtttctcttaggtaaatacctagcagaagaatggctgggtcaaacggtatattttaagaaactgccaaactggtttccaaagaggttgtactattttgcattcccattagcagtgtatcaaagttccagttgctctacatcctttacaacacttggaatggtcagtctttctggtaggcatgtactaatatctcattgtgattttattatttattttttcttggatatagagtcttgctatggtgcccaggctggtcttgaacttctgggctgaagcaatccttccacctcagcctcctgagtagatgagattacaggcatgagccaccatgcccagcttctccatgtatttttaatttgcattttcctaatggctaataacactggtcttctttcatgtgcttatttttcacttatatatcttctttggtaaactgtcttttcaaatcttttattccctaatctggaaagtggtgcccatcacttctaccatatttattagaagtgagtcagttaagtccagtcaacattccatgggagaggattacattggagtgggacactgggggccatcctagaggctgtctaccacgtgtggcttcccatttcttttagggtaaaatccaaactccatatcctggtctacaaagccctgctagatctagccccagccttccacattgcttttttttgttatttgaacatgctaagctccttctccttttacggccttagtatcttctcttgcctctacttgggatgtttttccatcagattttcccacagttgatcatttgtcatttgaagtcccagcttaaaagttacctcctcagaaaacccaacctcagtcacccaatcaaagtagtctaccagtcactccttatcaaatcactctgtactaattctctatgtgactcttagtactgatagaataaaagtttcaatgtaacaggaaatttctttacctcattcatcgttatatcaccaaatcctagaatagcgtttcacttgtgatagacgctcaataaatatttacttactgaacaaatgaatgagatctccaaagaagcaagaacagatgggatccatagtatagctgaagggattaaccttggataaagttcctgtgactactgctgtttaataaacgaccccaaatttagaaaaggcatagtgaagatgtctctgctccacaatgtctgaggcttcaatttggatgtcgtgaaggctggaagtgactggacagttggggctgaaattatccaaagttttgctcactcacatgtctggtggttgatgctacctgttggctgaaacttcagcttgggatgatagccaaaacatctacgcaaatgcagacttcttcatggcttgcttgctgagttccaagagtaagcacttcaagaaagctaggtagaagttgcatcaccttttgtcatctagactagaaaaatcacttttgctctagttataagcacgcccagattcaaggatagagaagaataaccccatttcttgacaggaggagtgttaaactcacatagcaagaagaacacatttaggatgggaaatattgttgctgccattctggtcaactccaactatatcatggccagttttgtggccattcatgccccaacaatgacaatcaaagcaagaaaacagaggagaacagcctggaaattctaaacatttatgtttatcagttttacaattgattgtcagtttttatcttcaactaggtaaggacaagtggaaatcattcccaggtcttgtttttgttcagtgtccttgtgtagcttcgtggcagtgggatgtctataggtcatcttggcagcacctcacgtgactaatgaaattttcctttcccttaattctgttttgaattttccttcctttcaaacgcagccaaatttattagtttactctgagagcaacattcaggagattaatccaagtaccactggaaaagtgattcatctttttaatgagcactgaaaaacacaaacaaaaaaaccccaaaacacttgcccagattcatttttataacggatgggctctttgacaggcaactggaattctttagcagagattagctgtctgtggtttgtgggctccatttcctttcaagtgtttggttcagctgcaaacaggtataacctgtagcactcattgtttctctctttagtcttcatttctccattgttaaatttctccattttatatcttcttctctagacactgctgtgaaaatttgtgtcctagatatttattttttgtttcataaattataaaagaatactttgcctattttccttttgaagtgtaaataggctgcaagtagtctgcttctgttgtagagtgatgttttccacttgccatgcttcctggttactgacaaaattagacagtttgtgcttggatgctggtgggaatttagatctgtattatgatatcttgaagccctaagccatactgtataaaagattctatcccaaaccactgaaaaatctacacagtaatgatgattaattatataaaaagcttaagatttgcatataagaaacatttcattaagagaaagaggaatatgggggaaaggtagagaaaaaaatatgagagaaggagattgtgtcaattactacatgctatgttcctgagaggagacagaaaaagtacaattatagctccctcacagaaaggactttacaattttgttaggaaaggaaaaagaaatctcgatgcataacacaattagagaagtataatatgcttcatgcagtgaggttccaactttaactaagccctataattgtgctgaaaagaaagagaagtttggtttggaataacatgggaaggttcagggaggaggtgagacttcagccaagacttacaattggcaaggggagaagagatagccttccacaaaagggtaacagaagggggcaaaattctgaggcctaaaagaaaggcatccttgccttggggacacctgtggcctacaatcagcacatggggagttcactactgtgggagaaataaaggcctccagctggggtccaggggtggggtgagggaggcttgcggggtgcttatcactgtaaaccaaaaataaaatttgaaggtccgccctcaaccgtctgaatggacttcctcctgtagtccagggtcctccaaatttaacctaaaagactggcttaggccatgatgggaagctgaggtcagacatgcctcattatgcccttctttcttttagaatccaggaaaagctacacagcatttaatatcaacacatataccttgagtctgataagaaacacaacttactttctctgaagcctgctaactggaggcttcatctgcatgataaaatttcggtctccacaagttcttatgctaacctagacattcctttaaatcaattaccaatcagaaaaaaacttaaatttacctataacttgggagcccatcttgccccacacccgctctgctttgagttgtcccacctttgtggattaagccaatgtttatcttaaatgtatttgattgatgtctcatgtctccctaaaatgtataaaaccaagctgtgcaccaaccaccttaggcacgtgttctcaggatctcctgagggctgtgtcacgggccatggtcactcatatttggcacagaatacatctcttcaacattttacggagtcttttttttttttttttgtcagtaccacagacaaccacctgactcgaggaccttacctatttctcattcagccaatgctgcagcacgttattaacgtccttgaaagcaagtcttatacagagaaaacttattttgatatattaatgaatctgatcagaatggaccagattggggggatagataaatggttgcaattgtgctccctggaatagctttggagtttacctagatcttctgtctctttaggacagagctgcttgtgtttatatagcatcttacacaggattgagacaacttcaatttcctatatcaaaaaatcgggggagggcggtgggttatgggggtgttcaaacctcccaagtgacatctgctgtgactgcatgtcttcctactctttccactgggatgcacctctggtagctgaactataacgagaaggtaaaagctgtgtccaatacctattaagctgccttcttctcaacagctggggaggtggcgggggtgggggggggcggagggaagtcttttcaacagttttacacatttggaaataggcctaaagtgaagaaggggattttcaaattggtgtgttggaaaaggggctgggcttttgagtttgaaatctggtgctgtcacttactggttttgtgccctgggaatatttatttcagttttcatgcctctgtttttctataggcaaagtagaaaattcgaaaaggtcctcaacgagtttgtacagctgctcccactccctcatcacctcttgtgggcctttggaaatgtatgttggaggagacattttggattgttgcaatgacttgggagtgccatagcacctagcaggcagaagccagaaacaccaaatgtcttaacaatgcttgaggcggtgctacaaatgaagtccttctccaaatgcattgagccccaagaaaaatcgctgattctgaggaaccttccaactttaacaatttcaggacgtccctaagctgagctaggaggcaccacgcacaggccggaggcaccacgcacaggccagagtctcccaaatcctgtcccgcactctctcccaccttattaatggccagctcatctttcaagtttcgacttgaaccacttctcagagatatcttcccaggtgcccatcccaacgttactattatatcataatttgattctccctccccccatccccccgccaactctgtaaaccccaagtataacacaggacgttgctatttgttgactgacacatagtgcttggtgaggtcacgctggcgctgaatactttttgtataaaccgacgaacagctgatgaccgcatgaatgctcacacaaggggaaagggcgccaagccaaggagccggcgtcatccgacgtaacttccgccctttaacgctcctgcggacgcccccttctcccagtccgtgtttgtttccggaatttcaataaagctcgattcggctcgaagaagaccccgttcttccgggaaaatggcgactcccgctcgtgccccggagtcaccgccgtccgcggatccggcgctagtagcggggcctgccgaggaagccgagtgcccgccgccgcgccagcctcagcccgcgcagaatgtgctcgctgccccgcggcttcgagccccaagctcccgaggacttggcgcagcggagtttggtggagctgcgggaaatgttgaagcgccaggagagacttttgcgcaacgagtaagctggggtcccgcggagtctccgccaggctccttcagctcgagctccctgggcgctcccctcccctcccgcactctgttcccttccctggaaggtgactttgactcagtcacattcgcttcagtcctacgggcgagtggacggagggcttgctgcggcagagccgtgcctcttcctggccaggcacgtatgcctgcgaggatagctcggattgaacggctacctggcgttgcagggagttagtagcccctggtcggttttatttacccggggactgtggtggttccatgagtctgctttctaaacccttttgtcgcccgcacccctaacccataacagattgtcagcttcatctctggattctaagcttacaggaaccgtaggaaatgggaagagtgggatatgaagaggggtttattaggccgggaaagttcgaccctcattcagctggctggttgaacggattttagcaagggagccacgtaataaaagtgattttgttttttaggcagctttgttcagcagcttgttgcaaaagatggtttgaaggaataaaaagcagaagacagtagaaggatattttcagagagacttcccacgagacacttgtaagaaagtgagctaggaagggattgggagaacttttaagcatggactaatttaaatgcagttgacagagatggctgaagtttccaatctatatggaagaccactagcaaaaataggaaaattcagggagaggaatagatccaaggttgattttacttagggtgtgcagagttgagaggagagcaggacagacatttggttaatcgaaaaccaaacacttaaaagctggagaagtagtcatgaggctcaagaaagagagaaccctggaaaaatacagaaaacaggaatttcagctgtagagtgttgttaatagttgaaattgtggggatgaatgtagtgtcaaaaagaacagaggacttaaggtgtaattttttctttccatttattgtatagttaaagaaaagggaatcagaaaaggaactctgtcatccagcaaaagggacaaataaataattggttgggatcaagacatgtgttttgaccttgtgagaataggttttgaatgtatagcagtgaattaactttttggtctcaggactccgttatactttaagaattattgacatcccaaagagctattttatgtgttgtatctagcgaaatgtatttacttatcagaaatacgtctgaagtctttaaaacataagcatacacaagcacacattctattctagaacaatgatgtcatcacatgccatgtagcctctggaaaactccactgtacccatgcgagaaaatgagagggaaataatatcttagtattattatgaaagtagttttgacctaataggcccatccccacactccaccccatccccaaattttggagattgcactttaatgactgctggttcttggaatgtcttatgtgattattatatgcttaaaatacttttgctgaaattctaatttgctgagacaaatgaggcatatattccctattcttcctgcattcccttgttttttgggctatttggataatgaccattttaattgttttattcttgttttggggcagttagaaatcagatatttgacttaaaaatcagcttttctttctttgaagataatgccttgcctttttaatgttatatctcaagttaaaaaaatggctgtaatgtaatagtattcttttccatttgacagaaaattcatttgcaaattgcccgacaaaggtaaaaagatctttgactcttttgccaaactgaaagctgccattgcagaatgtgaagaagttagaagaaaaagtgaactgtttaaccctgttagtttagactgtaagctaaggcaaaaagcaattgcagaagttgatgtgggtacagataaggcccagaattctgacccgatacttgatacttcatcactagttcctggatgttcctctgtagataacatcaagtcatctcaaacctcacaaaaccagggacttggacgtcctactcttgaaggtgatgaagagacttcagaggttgagtacacagtgaataagggcccagcttccagcaatagagacagggtaccaccttcatctgaagctagtgagcatcacccgcggcatcgtgtttcaagtcaagcggaagatacttccagcagctttgacaacctgtttattgacaggttacagaggatcaccattgcggaccaaggtgaacaacagtcagaagaaaacgcaagtactaagaacttgacaggcctttccagtgggactgagaagaaacctcattacatggaagtgctagaaatgcgagccaaaaacccagtgccccagctgcgtaaatttaaaaccaatgtgtaagtaccctcggaaacaggcctgtaacaggaacgtgatatttgttaaactcaaaaatttacgagaaactgggtgtggtggtgcttgcctgtagtcccaggctactcaggaggctgaggtgggaagacagctttgagtccaggagttgtagaccagcttgggcaatataataagaccttttctcttaaataagtcaggagaatgctctaagttccgtgggctttgtatgagaactacttgtagttaggaaataacatgttgtggcaacactgagaccagcctggccggagtagaagattcatgttgaaaaatatttagttttgaaaccaaataatcgacaaggtcttttaaagcacatgggggagtgttaaattttaggatgcttagccagtatttcataataaacacagagttggagagaatttattatgacttctttttttcagaaccattttttagtgtacagctttgattagtgtactatcaaagtgtactctctttgattagtctgtgaactaagggtaaagcaattgcaggagctgatgggctttccagcagaaattatttgcatgctcactgtatgtaagcaagcagcaggtgttgtggggacacaattaagtcaagattcttaaaactcctttgccttttttgatgttaaatctcaagtttaaaaacatggctgtaatgtatacatgtgtaatgtaatacaataccatgttcttcaaggagtttaagagctacatgaggacccaaggtttacacacttggaaaagagttaagctacataataataacagtttcagggggaaggaagctgagaagaggtttgaaaaactgtgaaaatagattcaggcaggataggcaaaaactctgcttatcagttccttgccataaatttgtttctgaaatttcaggaaaagtaaaatctttttgaaaataattgctatttacttgcagcaaatgtaacattcaactcaggtaactggtaccttcttcctatattgtatttacaagtatgtaacatcaaagttaaatcactactacctttctttgaaaaacagaaaacctctagtgaaaagtatctaaaacatgcttcttttttgttagactttaattctaccccagcattcattttaacctcaaaacattttatttctgctgtatagaaaatcaggattatactacattaacgtgatcaagtactctcttgtgtacagtggggtatctttcttcacttccaggatgacattttagaaaactagaaccatcatctagtcaataaataaaacaaagaatacattaatcccagttctgtattatggtcatttagctgggagtgggagagaggtaagggaatagtgaagagggctaccaagaattcaggaagtttaagagacagggagcctcctgtataagttagaggagaacaggaaaggcagggctttgaggagtccttaggccatagacaggtagggattgagagggttccgtgtgagaggtggcttggaggttggaaggtggggtcaggtagtgtcctttgggtcctttctgctcttccttctgcatactcttctggcttcatgtatcacctggatgctggaggctgacccctgtgcacctctatcccagatcttcccagaactttaggtttgcatagccaattaaccatgaaacttgatcacttgggtgttcccaggtacctcagcttaatgatgtacaaagtggaactgcagtttctttccaaggtgatttccatattccctaatagtgccaccaccttctcggttttcttcccctaaggtatcttcgatttttctcatctccatatctgctagccatgaagacctacttatttctttgatcttcatctctataattgttcttcatcttctgtcgaagtgaagactctcatctctctcgggctgtaattgtggccccttctacctctagtcttaactaccagtctatctccactgctgccagagtgaaatttgtaagatggaaatccgaacttgttacggagaactcttcattgcagtctgggcctaggctacttcccagccctctttctcgctgtcttttctgtgtagccagaaaagctgagtctgtctaccttctgtactttctctcactccccttgctgggatgcacttctctccttatttacatgggtaagcagttattattccaagactgttcaaagcttttttgaaacttttcttagcctccctgtctcccactagaactggccatttccttatgttccaatgtatcttgttgagatatctatcacagtatctctggtattgtattgcactgaaactttacatgtgtatttctttctactgggcaataagcccttttgcaaatgttctttgaataaatgaaaaaaaaaaaaaaaactccagatgaaatacaaggtttgaataaggaaggaaaaggcaaagagcctgtatgcacacaaacacacccctatttgttagagcaatgaatactggtaaattacttactgttacctttggaggagaattaattgctaaggtaaaggccatttgtgtgaatgttttaaatgtgtctacaaataaaataatctgattgtataacacaagttttcctttcatcaggttaccttttcgacaaaatgattcatctagtcattgccagaagagtgggtctcctatttcctcagaagagcggcggcgcagggataagcagcatcttgatgacatcacagcagctcggcttctaccacttcaccatatgcccacgcagctgctctccatagaagaatccttggcacttcagaaacagcagaaacagaattatgaggtatttagagtattttttttcttgtctgtttgttgggtgctgcttacataagctagaatttactccaggttcaaggaggaaggaatggaatagaggggattaggtgcttccatgagctcagatctatgccactagttttcagagagtcacaaagttgctagaactgcaggaagtagctagagatgatcacagctaccttcaacattaaagtggtgatttgcctggagatgtggggagacttgtagaatttcatgtcttaaagctcatttacctgcctgttcctgttaggatagtagtagcatcgcatctctccctttcaccttgtaaaactcatgtgacagcttctcagtggcggactcaaacccagaccccttgttagagaatgaggagaatgtagttcccaggcttccatcttctgcagtacaggggagggcatagaaggagtgggaggataatgttgtgtagccagcagacagtgagacactgctttagagcataatctgcaggcccatgtgaagagagaaatatctcctgcttttggcagcttaatcaattttgcatagcactttgtttccatgtgttttgcattgaacttcaaacatgtatgttgagagtttgtatacagaataatgggatgggagaaaataagtgtgaaggaccataggggaacagaaaagtttagaagtatttagtaataattttagcctccaggagaacagtatcctgtctcacttcctaggtattgattagctagattttagtcaggtactagtgcaccaactagtataacaccagactgttcaggagttcgagaccagcgtgggcaacatagctagactccatctttaccaaaaaattagccgggcattggggcatgcaactgtggttccagctacctgtggggctgaggtaggaggattgcttgagctcaggaggtcgaggctgcagtgagccgcagtcacaccactgcactctgtatagcctgggtgacagagtgagaccctgtctcaaaaaaaaaaacaacaaaacaggctgttaatctgctttggcttttcataaaagccttggcatggattggcattatcaaggtgctctttttgaaaaaaaccatttttctttcagtgcattaaaatgactgtctagttatggctgtagcattgaggaagtgtttactgtctctgagctcttaaatgcctgtcctaagatatttttaggttgaattaaacccttcatctttaaattgtttttttttagcagagaagttgtagtggtaatagctcccacttttactgacccatattcatggcttgaagaggaggacatcaagaagttcaagaaagcatgagaaaagggaagaactgaattaggaatgacattgccacctaccatcagttggtggtaaagtccttgggagtttttaagtacattgccagtgtctgaaatttacttggactttttattggatactagttgctgtaggactttatttggagaggaatagtcagctttttagtattaatttcttgattttcattttgccattgaaatgtaattcccaagtctggaagtcatgattgtaattagggaagaaggtcctgtcagttgtagaaatctagacagcattagtccttctttttttttttttttttttttttttttttttttttttttgagacggagtcttgttctgtcacccaggctggagttcagtggcgcagtctcagctcactgcaagctccgcctcccgggttcacgccattcttgttcattcttgtgaacccgggaacacgccgggttcacaggcacccgccaccacgcccggctaattttttgtatatttagtagagacggggattcatcgtgttagccaggatggtctcgatctcctgacctcgtgatccgcctgcctcagcttcccaaagtgctgggattacaggcgtgagccactgcaccgggccccagcattagtcatttttgacatttgataggtcaaattgttatgtgagtgtgtatacatgtgcatgtgcccccatatttaacgcatctgtatttataagtattgtagtgctaagctcattactcagtttcttatatagaggagtgtatttcagtgcaatgttgtatattaatggaggtcagtaacttcaactgtagcaggctggtggctgtcagaagcattacccagttgtgtctgatagggcacagccatcaggcttgtattgcccaagggagcactcagtgaggtgtcagtgtccctcttattgctgattctaggtaacttcccattgaaaaattgtaaggaagagatgtgaacgtgtaactttgtgctttgctctttgttttaaaggagatgcaagcaaagctcgcagcgcaaaaattagctgaaagactgaatattaaaatgcggagttataatccagaaggggagtcttcagggagataccgagaagtaagggatgaagatgacgattggtcctctgatgaattctgaagataatctcctaaatcactgacgttgagatgtcatcatcttacatcagactttctaactagtatcaagatcagtgtcagatattgttgagggaagtaattttataaagttacacaaaggtagttataaaaaaagcccagtttgtctttcagaaggtgactttcatgtgcttgaaaagtttaatatttgaatattgtgtttaaccacatggtattaaaattttgcaatatattgtgtattggtctgatattttagtatatagtagaacatactttttttttctttaagccaaatgaaaagaggtaactttgcttttttcctttttcttacctatcaaatagcatttattacatgtctttcagtgaaatacttagttgttccaggcacctaaaatcaattaggaagacatagttcccttcttttttgggtaatgaagggagcagtctaaagaattgtatgcatgtttgcatggggttattgagacattggatgtgaaatacctaggaagacatgtatggagaatgcttaacaaatgctcttctcctttttctgtcttcccttaggaagaacgttatctctcttctgattaggaaggacttcccttttgagtagatgctggaaagtggaggttttttttgttggtttgtttgtttggttttgtgtttttttttgagatggggtcttgctctgtcgcccaggctggagtgcagtggcaggatctcggctcactgcaatctaggtggaggtctttttaaataacctcatgttacttcaggcaaatctggtacaggagaagcccaagctaactgagctgggtgaaggcttgtgcatcacctggcttgagttccttgctgtcacagatgataggttcatgtacacaacattaatgtttgataaggaaagcattttttttttgttaaaattgaattgtcagtactttacttttttccccccaaataggtatatatagactgcagaagcttcagtcccatatataaacgttcatgtcattttagaggattatatggttgtctccagagaaattaacttacattatcaaaaaattctttgtctaatatattggagtctttaaaagtgttgaagaataaaatattaattagaacaacttcaaatgctaaggtgatgttttaccgggacttaattaaatacaactttttcctttcgaaaaagactgttcacatttgcttccaggtgtaattattgctttcattccttacccccctcaagcaaatgtgaaaagtatactgacctaagattctcattagttttagttcttaaaacgaatagtaaatgatttcacagcgtaaaatttgatgttatttctggaagctggatgatatggaagagttcatgtgcctggacacacagttccctgtaatcctgccatctagggagataaactctgttaacattttgatgttgtgtttttgcttatttttctatgcatagttatgcatttatattctcaaaaatgaaatcataatgtacattgctttgtagtctgctctatatattgtcaatatgttcccatattaaatattttgctttttagacagctgtaggatattttatttcatgggtataccataactttaagatttatttcctattcagcaatttgattatgtattataatgtaatctgtaaatagtgatatgattaacatcttaatcacatccatagaaaatgacttatttccagaagataccgctctaaaaatgaaattgttaggtgaaagtgtttttgagaatttttatatatattactcactgcagagatcatgttcatttacattcccattagcaatatatccaatgctcagaattgaaaattactacttaaaatctttgcaaattgaataattacagaaaagggctacatttaaaatttgtatttgtttttcttacttagtgaaggttgtgttttttttcatattcattggccatgctatattcattcttttgagaattgctcattcatattttttctgttgcttgcttggagaatttgctctttttttggcatataagttcttaagaatgtccgtcctttgtcatatattgtaactttttttagccttatttgtcatttaacatagtttgtggtatttcagtatagaagttgttttctttaggagtctacctttgtgtatgtgcttgaaagtatttttgtaatccaagaatggataaatgtccttattttcttctagtattttcttatttcacttttacacctatctttaaaaggaatttaaattttgtttatatacattaactaaatcagtacaagtttggggtgaaaaggaaatttttaatccatctcaaatgtatttggttatattatataaggtagggatttgattttatttcgaagaatttaccaattggttcagtatgtgaaaccaccatttcccctctgattagtaatgctatttttatagaatattaaattcttatgtgtcttttgtgtcttaggccaatttctgggccttctgggttttttctacactgtcaataattatcgctttaattggtgttaatatttggtagtacacaggttctcccttgttcttttaaattttgtgaaatataacttacaaataagtacttaaaacagagcttaatgggtaaagcaacagctgtgtaatcacaaactagatgcagaggaggtcttgccagcactccaaaatctctgtgtgtcccctcttgacactcactgtttcccccagagctaactatcctgacgtatggtaattctccctctgtccttttaagaattattttaccagttatgtgtataacaatatggtttacattttgctcacttttgacttatataaaaatagaataatact

SEQ ID NO: 74 - DNA, 125639 bp, Homo sapiens
  allele (1)..(125639): GRINL1A Variant Allele (SNP12)
gctgaggctgcaagtagccggcgccgtcccgcgtcgcccccgcgcagggcgggccccgcacgcttattctgcccgggaggaacgccggcgtccagcccgctaccgaccgccgctgcgggatgctgcgctccacgtccacggtcaccctgctctcgggcggcgccgccaggacgcccggggcgcccagcaggagggtgagtagcgggggcgggagccgccgccgtcccgttcccccatcccggccgccccctctagaggggactagggatgggaaagctcgggagccagcacctggccccgacgccccaccctgggctcaactccccggtcctgtgccggctctggcagtgaccctcccgcttgaggtttcagggggcccaccagctggtaggagagggcttaggggactttatggaattcccagagatttcctctccttcctgcctttctgtcaagccgagtttattggcggcaccagtttaaaaatgaaggaagacatttgtgcagtgtccctaccttgagactcaaaagtaatgaatgtatttaaaactcaaactttccttcttccattaattaaaagaaagatggggtcacttgtgtccactagtgatagggtatccactagtgatagggtaattctggagtggggttagccaaggtgggcaaaccagaacagcagccggccgcccaggagcccgactgtgtgggactccggtttatgtaaaccactttcttctgtctgatttaaatattagcacagtgacaacaatggcagcactgaaagcttgggacagcatctccagggaaggtttccctttggaagtgctgtttctttttgatctttgtggcatcttttcccatctctccagatgctctgtaaaagaaatgctccatctttctaacacggtcagcaccttagagccacagccaggggcttggcttgtggctttttagttcttccatttatcatgatgttcaatacttatcatttggtacctctttgctctgattgagacttctgtaatcgtgtttcctcaagatttaaacaggtggttaagtccaaagcaaaacccccactggttctgtctgcgtgcaggcttggacctgcttatttgcttttacatgccttaagcgagtgatggtggtcaccttataagctgtctttcttagctctagaagaaaggtgtgttactcttgggcatgggccaactgatggattctggggtgtgtgtgtgcgtgcactcaccagacacttaggttgtgtacacaggcgcacacacacacacacacacacacacaccccagaatccatcagttggctcatgcccaaggttgacagaactccagttgtccaatcattagcatcatagagtaagatctacattgggtccaagggggtttccaaccacagtcctggccttactctaagttgggtgtttgtatttttctatggaaatctttctcaatttgaacacaattgcaactgagaaagaatgaagtcactgaaaagctaaccctgagccctgagaggatcatatgtgtgaccagactgcatgaattgcatgaaattctctgtaacttcccttccagaggtggggattagttggggtacctaacctaatacggtgggttgatacaaatgtgactagtatacaaataacatttctgaagattttgggtcaaacgtttcctttggaatatttatttaattataggtgctttgctgtcggacacattgtgacactcttgaaaagactttgccttttgaataagatggcagacgtattttggactggagaactcagggctcgggatcaggccattcagggctgtcctgggtacactggtacttgtttctggaaggaaggtatctaaagggtctagggttctgcccatctttatggtttctagctctgctcatgatttgcagatgttacaagtactatctgtgtgtgtgctggggattgtgtgtgtggtgggaagctgtgagatgttgattaattgatttattgaacattcataaacctttctctgtgtggtaaagggctggcattggggtccgccctacctgtagaggcagacattttcccaaactaacatcaaacaaagtggtgatggttatagtggggtgaagagtttacaaagttctgtagaagctaaaataaaggttcttcctgaggcatcaggggaaggcctctcactaaaggtatgtttttttgagatggagtctcactttgtcatccaggctggagtgccatggcacgatctcggctcactgcagcctccacctcccaggttcaagcagtcctcctgcctcagccttccgagtagctgggactacaggcgcacaccaccatgcttggctaatttttgtatttttagtggagacagggttttgtcatcttggccagcctggtcttgaactcctgacctcaagtgatacaactgcctcggcctcccaaagtgctgggattataggcatgagccacccagccccgcctactggtgatgtttgagtttaatcttgcaggatgagtagaatttgtaggggaattgacattattgggatactgaaaggaggaaataaccatctcaatggaatacttggcatatataatcatgtactgcataaccacattttggtcaacagtagccaggatatatgacggtggttggaatggtaggctatctcatatcgcctaggtgtgtggtaggctataccatctaggtttgtgtaagtgcactctatgatgattacgcaacgacaaaaatcatcaaatgatgcatttctcagagtgcatctccacggttaagtgacacatgactactttatcatgatggcaaattggacctgctttgggacaaaatacctattgtttagaaaagcaggaacgggatgtcctgaaagtaaaattgtagaccaaataatcattggaagtgtacctttcattgaaagttgttcagcaaatactgtattgttctgttattcctctctgatgatggacaagtgatggtcttgaacatgttatccattaaaattgtatttctggttcatccaaagagctcatcaaattgggtactgcaggggaaaccagcctatgtgggtccagatattcaagccaaccagaagtggtggtgacagctgacactgagcagggactcctgcgagccagctgccaagggttatgtggctggctggactgccaccagttagcctttgttcaatggctgccacctgcaatttgtatttccttcttatctgaaatcacctctcaaggaaaaaaaaaccaacaggtggagagagtaatttctgtcagctgataaacaaagctctgaaaggcatttatggatgccaaccagcagaagttgtgaaattaaaaaaacttccttcaaaccagttgtgcactaaaaatagttttatctatggcaacagcaggaagacaaattgactggagaataaccacagccagaagatgaccttggggaatggggggaaacgattttaaaaatattgaccttgcttcatgcttttgaaaggaattttataaatgccagttagtcttgctaaatgggcctttgaaatggaaggttggttgtgtggctgggtcgtgtgctttgcggggaaggcatgtgttgctttatggcttccccacaaagcacacaaccgggtcacacaactgacctttcggcacaatacttactgccgagtatttttggctaagctgttctgatcctgggctgtggaatgatagatctgtcaaggatcttctccagcaccttgctctcttgataataaaagactgttggctggtgttgctgctatcgtgacccgtcactggcacagagaaaaaacaaaacccaacaaggtcacaggataggactatctcctagcctgcccttgctgatatttctttctatttggcaaaggcttcctctgttaaacactggaatgggcctgctagtcattgttccttggctaatgtgtccctctcccatgtcccattgctgcctgactgggctaagttgtgagggtttggaaccaaggcgtcctctgggctaagggcagggcttaaacctgtgccggtcaaaaatgatggttgtaggctcagaaaaagaggtgcccagctctatgcttttgatctttcacattgccttgtttgatagaggatgaacagacctgaattctggagactcgtaaggaaacttgatttcccctagacatttatggagatcccatggcttttctacaaaggatatggaatgtgattttgacccatttgtctctgggggcactgatggagtgctgcgtatgaggtccctgttgtagtttacctatgctgtgcatccatatctgaacaagagacctggaggctggtgtcactaagccctggtcactggggaaggctttgaagtcaattagcctcaaatgttcttgtctaattgagttcaaggagctgtgggcccagggctgactaactagagaccatgttaaatatttcaacccaagatacttctcagcactcatcatgccttatggtcttacggaattccagtacttctccagcacacagaagagcaatacagtggtgtttacctctttccctctttggtgagtgatagttcctaagtgtcaaccacactcctggctctttttcactcttaaaggccggggtgatctttctaaaatgctaaatctagtctcctgactcgtctgcttcaagagcctcctcagtactgccaggaaaaagttcacactccttagtgtagcatccaggccctctggtttggcccgtgcctgtgctgtttcccctccctatatgtggtcttctcagatattccaaatcgtttgccatttccccgagctttcgatgccgttccttgcctctttgcttttcttcatgtttctcctctgatgagtgttgtctcctctaggaagcctgccctgaaacctcaaccctccttctcgtgttcccctagaggcctgtgcatgccaccattacttgcgtcacctgtgattacctactggaagacagggcttaggaaccacccctccccaggcctggtggaataggcagttaaaaacagaaatctcaccaggtcctacgtagaggagccacagttaacattgaattggcaaatggaaaaacaggaagagaagccttgggttaaatccatcccatcacttctgacccacctgggcaggaaacgggtgacaaatacatgggaatgctggcccaggtgaggaggttgacagttctgggaagtcctccaaatattcgagttgcctcatcctgctgcacagttggagcttcatccctttggttcagtcagtggttctcaaccagttatacacagaatcactgggaggcttaaaatagccatgtcgaggcctcatcccaaaccaattaaatgggaacatcttaaagtacagaaaagcatgagtattttttaggaagcttcccaggcgattctaatgtgcagcaaggctaacaatatttctttaagcattactcccttctatagctttcttggaaatgcagacactcctgggacagtgttgcagaaaggtcccttgagccttgtgggatgaagggcagggtggtgatggggcagggagggggagtcctcgcactccaagtcacactggcatctttgtgtgccttcatccacctgtgttttctctctggatcttggcgtttggggcacattgtgtgcctagtacagaacacagccacagaaagcaggaatgttttgtatgcctctgagctaagaatggttttcacaggggcctgcaaaacctaaatatttactgtctggctctctacagaaaaagttcgccccaccctgatgtagataattgggctgcaagttcagggccacagcagagccaagaggtctaatctagatggggcatacactgttccgcatgcagcctgctgcaggctcctgggatttgatccttgtgctgagcagagagtgtggggtctgttccccctagccacacttacaagggccccaccttttatcattaaggggagctgggcagggacccacagtcacaaagtggaacaggcctgagagaaatgtaaatgcacttggctaatttccttagggaaatccatctttgtaaactggcaaacccctgtcacctccctgaatcatcttctccactccctttttatttgagatagatatttttcccctgggtgagccaaggtgcctgaagttgagagcatgatgttactggatccgcagagtaccccgtaggtgagacccaggccctcatctccacaaaagggtcagaaacaaggcctgaggggacccatgtagctccccaggggccctgagttgccaaaaagggttttgttgtgctttttcttgtggaggaaacctgaatgctacctgtccctcccttgctatccttcccaggggggttggtttcaagaaagtgcaaggcactccagggagtttcaggtatattcttactttgttttagttcaacctagaaaaaactacaaaacccaacactgagcgagcgcccatcatgtgttgatactatgctaagcaccgtaggggctatattaagtggtgacggtacaaagcttacttgatcactccccctatgttttcccttccgtccattgtgtggtgcatggaacactggaggcactgaaaaatgaccagttggattattgaaatgaactcagatttgaatgttagtctcttcctccaaagatttgaatgactcctcattgtcttctgactagagccagtgcttctctatcatgcatttgtagattgatagttcagcccctatctgtttgtccatttgcctgtcctacccaggcttaggctgcaggttcttattcttggaacttgccgacatctgtgtgtttggcacagactagaacgccttgcctgatagctgtctgctgttgttatgatggtgggttctccaaacctcactgacctgtaaagtcctttctgtccttctatacccagcttaaattgtatcccgagggtccttcctgagggactttcccatatattcccacctcccattaagattagtgttcttcttcctatattcccatgataataaagaatgtttacagagtgcttaatgcgtgccagaaattgtcctaagctctttacacacattagctaatttaatcctcacaacattcctaagagggtatagtattgttagttctttttacaactagggtaatggaagcactgaagactaagtggctttccaaaggtctcaaagctagtaggtgtcagaaccaatactggaagccaggaagtacatttccactatgatttaaccacaaagctatcctgtctctctacaccttgtattggttattccaagtgttcttgattgccttgtttgggtatatttctagattatgtactccttggaggccagcatttttttttttttttgccatcgtcgtaccctcatagtccctaaaaatatttcacaagtaataggtgctcagtaactgagtaataaagtatgctgagtccagcttcctgctttgatctcctggaaggaacccttgcccccagggacagctggttcggtagcagtggtgttcagggtaggatgcagttcttcgcattgtgcataacacaagccctgaaccagctgctttgggaacccctgggaataaagtgccctacctgcctttcaggcactgccaagcctggggcatctctggagattgtgtatccgagtttcaggagaccatggagatcagcctcgtaaaatgctcggaggtaaggaatgctgccttgatgttactcggggagattttcccatggggagattgcggaaggtgaatgaatggagggaggtagactgtactcggacaactttatgggtggttcaggggttactgtccttagtgcttctgttagggattcagagtaccttttagacctttagaatgtcccccttgctgctcctgaagcagtcctgtggaaggattagtctctttctggatctgtctcttcccgacatattttctcccagtctttgttattactataactactattattattttaatcaaaaccttacatatcttaacatcgttgccaccaacacagaaatctgtttccttaagaatatcttccgcctacatctacacaagttatcagggtatatttaaaaaattaaaatgggattattcttaatgttttgttctgcaactttctttcttccccatggccatacatttggctatcttgtaaggaagatgtgtgattctgttctaagctgggtttaaattgctcctgaacagccagtccatcagtgggtcagtgtttattaaagaaaaactagctttgctccttaatgttttgatcaaagcacctctgttgacaagagtaaacttcagacagggtgctgcagtagcctcaagcgcctgctgcaactgccaaatgtctttgaggtcatatgttttattttacaagttcattttattttatgcattctgtttaccttgtggctttgtatacctcagggtattgctcagtgtgagagcttcatataagggttgcccagctcatcataggaagtgtgttgaggaatatagatgggcagatgaagaatgggctcaagccaggggagggaccatctaacttttgagtgattggacccatgggaccccctttctgaaaattatgaccattaaggattacccctctaaaataatcaaccaaccgaaagtcatcacttacagtgttaatgtctctgattcattgaccaaattgttattttcatggaaacaggactgtgaggctaagcaggtctgtttcattttgaagcatataggatgatgataatatctagataatagtaaaaatatctggctgggtgcagtggctcatgcctgaaatcccaacacatttggaggctgagacaggattgcttgagcccaggtgtctaagacccatgtgggcaacatagtaagactctgtgtctacaaaaaataaaaaattagccaggcatggtgatgcatgcctgtggtcccagctatttaggggcctgaggtcggagaatcacttgagcccaggagattgaggctgcagtgctatgattacaccactgcactccagcctgggcgacagagcaagacccagtctcaaaataaataaataatcaaataaaaataaaaatatctaatattcatagaggcttactatgtgacactctccctttatcccattttacccttgagattcagagagattaagtaactttcccgtagacacacagctagtagatgttggagcctgtgtatgtgtgtatgtgtgataggcatatatgtacgtgtgtgcacacttgtgtgtgtgtgtgtgtgtgtgtgtgatgtggtgcaggagaaaaggacttccttttccctgcagaattatgcatggactagacccagcctaataggagattgttgagcaccacaggtttggattgtctctgtggtctgagttacactttgatgcttgtgcaaatgtcagactggtttcaaccagtctgaggggcctggagccagagagttgcctttctctggagggactcaagattccctactcaagatcagtgttgttgcccaccaggaaagagagctacctggtagtatggcttggtttctttttggccaacatgactgacggtgagctttgaaggttgcttgtaaagttggccccacaagaggcaatgatagccctgggggtcaggccacatctgattccggggtccctgggggatgatgcttgccaagaggaggatgaggatggagagggatcttgaaaccaagtcatgtgatttaaagaactggggttgtttcgtccagaagaaaggaagttcaagggacaggaggactgcctagaaaaaggggaattagtttgcagtccgaggacaaccctgggtccattaggtagaaattctggtgtaagctcagatcagcaagttagaggtgcctggtagcaaaatgcaatgccttggagggtggcaatggtgtacgtggaagtgctaacatgggtcccaaacctgggctccctaacctgttcatggaaaatgaacaggttggtgccacctgtcaggtacatttttgggtgttgggtttcttcaaaggtgggcaggttgaactcaagagatttttgacattccctctagccctgggcttctaggctgcagggtggttttgctaagaggccaccctgtggaccagtgcagatctgtgaacctgccaaccagactgggacgggggtggagaggatttgtttgctagggctgccatgaaaactaccacaacgccattggcttaaacaacagaaatttcttgtctcacagttctggaggttagtggcccaaaattaaggtgttggcaaggttggtttcttctgaggtctgtgaaggaactctctgttccaggcccttctccttggctgttgatgggtcgtcttaatgtttatatgatgatcgccctgtatgtgtgtctctccccaaatttcccactcttataaggacaccagtcattttgatttagggccacacttatgatctcatttttacttgattacctctgtaaagaccctttcttcaaataaggtcacattctgagatgccaggaaggcggtcaggacttcaatggatgaattttagagggatgcaattcaacccatattagggagccaacagcactcccgcgaactgagcccacatggcatttcaggcatgtgatggggaccatgagtataagagctaagaaagtaagccccggagactgcctgggttcaaatctcagctctgtcatttcccagccatgtaacccttcagaggcttagcttcctcatctgaaaaatggggcaggtaagagaatctcttaccataggtttgtggtgaggcttaaatgaataaatacctgtaaaacacttagaagatgcctatacatggttagctattactattattactgttattgtcccctcgtactacagattatagtagtccatttttccctctgttgagtaggaaaatgactttgcccctaagtcacccttcgtcaacagaatatgataaatcacacaaattgtagcttctctcactgagtggtataatgcttttttatttttaacagaaatggtgcaatttagactttaaaaaatcatttaggaacctttatccgatatttcagtgaaattttttggcagcctttaataaactgacgtgagaatctcagtgactagtgacaaatattcatggtgacatagctaattaaggagtcagatgtcttaccaaaactcataagcattatattttcttctcctaagcctttccagctaactgtcttacttttagtctgtatccaacaagcagggacagcttttttttttaaattgtagcaatgtacttgtgagatttaccattttgaccctttttaagtgtatagttcagtggcattaagtgcatccacactgttgtgcaactggcaccaccatctatctcgaggatttttttcatcttcccaagctgggattccatgcccattaaatactaactttccctgtatccttaccccctggtcaccacagttccactttctgtctctatgattttgattactcctggtacctcatctaagtagaatcatacagtatttgtctttttgccactggcttatttcacttagcatagtgtcttcaaggtttatccatgttgtagcatgtgtcagaatttccttcctttttaatattgggtaatattccattgtatgtataaataatattttgtttatccattcatctgtcaatggacatttgggttgcttccaccttttggctattgtggataatgctgctatgaacatgggtatatggacttttttgaaaaaaagttgtgattaaacatgtacatgtatattgtagaaaaattaaatatataggcaagtagaaagcaccctcccttcccaatagagatatccactgtgtatattttggcttctttccctgtaactatatttttgcctatacttgtgaaatgagatcattctatacatattcttatggaaactgagccattggtaaagaaatgtttgaaatagatcaagtgatttggtagtttccttccttgagccccagggtggtgggtgcctgtgctgtaccaggctggcctggtactgtgaaggtaaggctggccttatctcctctatggctcctgtatgatcaggacagtgttccccaatggaagtaggggaaatgggctgtgagaagcccaaggtcatctggctctttctgccccaaatgctgactcctaactggcctctcctttccctctcttctaggcaaatgtttgcagactacggctgaccgtacctcctgagagtccagttcctgagcaatgtgaaaagaagattgagagaaaagagcaggtaaggtatctccgaggcaaagccccaacaagttccagcctctatacccttaacccactctcccatctcctaaccaggccattcccagaggctgggtgtctgcacctctgttgaggagaaggccctctcaaccttcccacctcatctcccgtcttcccagaagacagagagctctccctagccggctctgccaccgacgtgccctgctcttgtttcttggtgaacactatggctttgtgttaccttgaagctgcagggacactggtcttagtgacaggtgctgtggcggggaacgtgggttttcctgaaacagcccaatccagttgcttcaaagggcctattgtgagcagctggcggggctggaacctttctcagcagcttggagcagcagccgggggctctgctcccgcagaagagaggaaaggctggcaggcaggctggtgcagggaaagggcactttcttggctgggggtaggaggcattcggcaaacatttttgtgacagctcctgtgctaagtgctgaggccgtgaagataagtatgtccttgccttgggggaatttgcagttttctgggtgagacgatgatgtgatatttcaggtgttaagatccagccctatatgacggaatctgggaacacagagaagggaataactgactgcttgggaggtgacagtgaagttggaggcttgaaggataaagaggaggtcctgctgacctctaggcctgtggtcctggccgacccattttactcattcataattatggggcacctactgtattccaggcactgttgtatacagtgggaatatagtagggaacaaagcagtaaaccaaatctgtcatccatggaacttatattctagtgggacaagaatggaagtaaacaaaataattaagtacattttatagaggttaggaggtggtaagtgctgatggagacaaagtaaaagaaggggtaggggtgccaggaagtaggcagtactttttcttgagcatgtattttatatgattataaagtaaaacaaaataaaatgatataaatttcataaatggagtcataacatagtgacctcttgaaatacaagcttgctttagagttaaccactaatgtggtcaactataaaaaagaaagcttctcatcgatggctaagtgtttgataatgtccctaagtttaccataggtctctgtctctccttgccctctcctccccactttctaccaaggacagagagctgcctgtgctgatgcaaatgatgaatgccagggaaaggaagtagggagaaaagcaaatgaagttctgactagagaaaggtgaggagtaaaattgctgatctgcctaaaaagagtggatgagttccactaaaaagatccagaaaaacagctagttctgggttgcagaagggaaaagatgagggggatatgggacctctggaaaataaggtttcactcagagatgaatggggtcctagtaaaggacctagcagccagtttgaatgggctttcactggccaaaatgggaacagctggagcatcaaaaagaataatgacagtcatggcttataacacatcgaatattaaaaaaaatccatacgtttgtagtgataattggagaaggggagtagaggcacgagatcagaggataaaatagggaaggctcccttttttttatagaacactagctaataagtttagaaaatctttgttttgtaacctccaggtatactcatcaatagatgcaaaaataagttggtgaaagattattgtaggatattctcaaagtatcaccccagcggattactgattctaaagggacagtaccttcacagtggagtaggcaggcagccagcatttcaaccaagtgatccaacctaacttcaccaatagtggaacgagctgatgttacatgacttctgaggtgattcacctaagaggtgcacatcacatatgtaatattcatgccaaacttgtttaactgaatctaataataaggaaacagaaaaccaaaatgtgggacattctgcaaaacaattggcctgaatccttcaataaattcaatgttatttttaaaaaagatgagaatttgttgcagataagagactaaagagacataacattaaatgtaatgagtgaacctggattagatggtggcaaaaaaaattatataaaagatagagcacatggacgcaggaaggggaacgtcacactctgggggactattgtgggatggggggaggggggagggatagcattaggagatatacctaatgctaaatgacgaattaatgggtgcagcgcaccagcatggcacatgtatacatatgtaactaacctgcacattgtgcacatgtaccctaaaacttaaagtataataataataaaataaaataaaagatatactgggatgactatacaattttgtatatgaactatatattacatattattgaataaatgttaattttcttgtgatgatggtactatggttatgtagttgagtggctctttcagcttctgtgtagctttgaacattctccacagacaaagtttgggagtaaaagtcctaagcagagagtggaagtggtcaggcttcagctgctacacccctgctgatgagcaggattgagtggggccatctgtcactagggagtgtccccttctgtcctcactgctcctctccctgcctgtcccttttagagctaatggcttggtccaagacatgggtctgggctgtgtccaggtgctcagagctgcttagaacactttttgaagaagtggcctaagctggagtgagggacaggacaagggcctggtggcagtacctgttggtacagacggtagaggaattggggaatatagtcttttggagttagacccaagcttcatgccttgggagatgttcgtgaaaggtttctgagtgccaaaactggggtggtaggggctggaggaccctggagggtctgtaaccactgaagaagaatcaagtaatcccaaggaaggagcctcgtgtgtttagctgtgtcaactggagtcaacaaattgtgtgtcagtttgcctatttggcttgaatagtgcttttcaaacttgtcaataggaccctcttttttaaaaaaaaatcagaatgttttactgagccctcatatgcaaaccaagcaaaagtggtactaacgggggcccaagtcctcccagtctccctttacccctcagcccccagacaccctcctgtggttgcttgagaactccaaggccctgaggagcacaggacaggcactgctgggatagcatatgcaccaggatacttcttacaccaggtggaccaggcgtgcagtctaagtgcctatgtgtggcacattggtgactcactgcagaagaactggggtagaggggaggagggtggggctgttgtttccctagggatgaagtccttgggtggtggcagcccttgaagtttctaggggtaactgggaggctgctctgagtgatttcgtcaccatgtcctggccaggttcctggcatgagtcactgagggccagggccatgcactgtcggggagactctgtaggggccacttccttggatgtggtttcaacatggcttcccctccttggaacccatggaattgcaagaggccaaaactctggatgaccctccctggtcacgtaactttggttcctttgaaggggcttcttctgtgtgcaaaggccaggggattggagctggctcagatatgtgagtagaaagttgtaaatggcccgattgacttctgttgcagtgagacttctcaaggatttccagggccctgttagagccgcacatgatgagggcagcctgggccttccttagtctttcacactgttctgggaggtgtttaatattgcggggatgccacgatgccatgggacagctggccatgcatagaggctgctgccagttgggccattcttccgtttgctgttctccagttattggagaaaggaattgctcccaatgtgggtgtgttgtggatggcgtattttgcccatttccacaaaggtgtgtttggaggctgctggatgcaattacaacagagtcagcaccttcttatggagtcaagggtttgtggggtgtatttggaggtttcctatccctaaggcagatgccctggctgcctgttccttttagtccttcaggagacatcaactgccccgacactgctttatgctgaccacagatgagctcccaaatgcacagcttcctcatctttaaagtagacacaacaatgcctggtttcaaattgtaaataagctaatatatgcaaaatgcccaccacagtgtccggtttataatatggattaaagaggtaatgactaaacactgaatctcttccctttgaatgccaaagccagtggccctgggtctttgtttttacccccttagaccttctggagttattctcctgcctgaagctgcctgtctttattttccaaacacatagcatctcttccttcctcataacccttgctgaggccctagccatgcttggagtcccttcactgccatgtctcagtttatctaagtcttccctgtccttgaaggctcagctaaaggcccacttcctttctgataacttcccagacttctatgtgctggggtggtcactcttcccttaacctacaggacacccaggctgcccctttcacttggcacctagccacgtgctgctaagaactccacataggtatagatatatatttttgcaaaatttgtatataacatgtatgtaggcacatacacacacacagagaaatgaggttgagtctttttattctctcttcccaaagcctaggtggctgccttgcacatagtaggtgcttaatgaatgcttattgattatgatgattgagttttatattagcttcctagggctgccacagcaaagcatgaaaaacgagatggcttcaataaccgaaagtattctgtcacggttctggagttcatatgtctgggatcaaggtgctggtggtgcctcctctgaaggctccagggggagaatttttctttgccgcttccagctgctggtagctcttggtaatccttgccttgtggcagcatcgctctgattttcacatggcattttcatgtgtctgtgtccagattttcccctttttatagggacaccaatagggcccagtctgatggctttctcttaacttgacctgctctccatataattcctaggtactggaggttaggactccagcatatctttttgggggacactcttcaacccataacaggttctttgaggaaatcaccttgaattatagtaacaactcagatgaattagctgtgggcttttatttgaatattgaacattaaaaatcattaataatatgggagggaggatgctgattagtttgtgggcacaaattacatgttgagaaattgataaatgtagaatataatgtttataaacaggctgaacattcaaattaaaattggtaatagttttgaaattaagtacctgttgttttcaaagaactctctgaatttatgtatccatattcttatccatagtcatgtgcaacagattcctatgtgtatatgcagggacacacacacacagacagaacccacaccagctattgcagacttagcatattgaatcagggcctcactgcacagttgaattttagggcatctgatctgagttgattctgcgtctttatgatggtaaagtcctttgcaaatagataaaatagcttgaggcagataccgttttaaatagctattaacatcccagctttggaggtgtccttcagtgacctgttgtttttaaagaagctgttttctctctagatctttgagaatgctgagtgagagagagagcagatgcgtgggtatggatgtagagttgggaactttcataacccaataaaatgttgaaaaggaggaagtccttgccagtaggttttatagtcctctttcctttaaaagccttggatgaataagcctgctgagttctcgtccttggcgtgactgtttatacaacctcgcgggctgttgccaagtgagcgagtgtgctgccatgattcagagcttcaggtgggggccgggctgccctttgtgacagcacaccagggactctgcgtgcccctcagagataacagcccctggaggatggggagagacctagagtttgagtcccggcttcctcatgaacccctgtggtggttgggccagtcaggtcatctctaggggtctttgctgcttcttctagcaaatagaaatgttagtctagagccagtgtttttccaaacattcctttattcacgttgataaatgtggaagttctattggtaaagcagtcaaggtgcagcgggtggagctgaaataagatcagggctatgttggctgcctccatcaggcccccaactcttcaccctacaaccttgtcagacacggaggaggagctgggaatagtgtctgaaaacccactggactatacaactcttttccatttttctaaccttctgagactttgtgattcactacccatgaagagaaaccaaggccactttgggggtgaatatttcgctgtcagagccactttgacaactgtaatgagaacagcaaaaagaccaagaagaaggtggacggacagacagactcattcagatagacatgtagagttgagtaggaacccatatactcaaaaatgtaaagaaaccacaccaccaatactagaaactcccagtatctactagtatgctattagcacactaggtgttttgtgtgttttattctgtgtattctttagactgcccactgaaattggtggtatgatccccattttagtgttaaggaccctgaagctctttaaagtacagaaaataactttcttaggggcacacagctagtagatagtggatttgcaattccaactcaggtctgtgacgggccatgttgccatgggaacattgacttgcgtgccttctcctatcagagaaactctgtttaggatatttacattttatcagtcaaggttaccgaaggtgtgtactatacccctgggttccagaaaagcagttcctgatttttttttctcccgtgtattcttcccttttccgcgggggttattaggcctaagcaactattgtctgcgttgaagctgtgtactagctgcacactagtctgcatggaagctgtgcactagcggtacgctagcactcctatcaggctgctatcattacaaatgccactctctttgggacttctgcttggctagaagctttccttttccttctcatcttaagctttgaaaatgatcttttctcctgagtttacttaggaaatgggcactattcagtctgtgagactgtcagaaataactaaattagttttattttttagaaacagggtctcactatgtcatccaggctggaaagcagtggctattcccaggtgcaatcatagcacacgattgccttgaacacctgggctcaagtattcctcctgtctcagcctctcaagtagctgggactacaggcatacaccactgcgcctggccaagtattttgataagccagaggtttcagtttttctgagaatatttatttcccaggctgtggaaaggccctttgggctcagaggtaatgttcatttttgtccaagaaagcaaaacagtgttaagtatgagtaatgacctgggccaaataatttgctgagatagatacacaggttgtacaagccagagcacattcccgaagtgccagcctctgcctgcaagatgggcagggaacccagtggctctgtgctcagcagtcccaggttagctgctgccctctggctggagaaaagaggtctgaagtaagaagttttggaaataacttggcttccagtctggaagtcacacgagtcacattatggcccttctcaaccatattggcagccaggatgtgtgaccagctgcccctcctggctggtggggcgggggactggctgtgttagtctgctattgtcagtttgatgcatgttgagctgcatttctgctcttatttcccctaagaatgctgattgaccaagggattttctttttttgcacagattaatcctcagtgtcaaggatgactgtatactccaaatattccatctttctttttcccttcaaaatgtatttatggagcatctatttatgctgggtaccagagatagagcagtgaataaggcagatgttgtccctggctttttggagcttgttgcattgtaggatcctatcttctcatttaagatttggacaatatcattggccttgttaacgcagactcttcaatggccagtaaatcccttaggagaggaatttaggctgagttagttttctgtagctgctctttctttctaaggcactggctgccagatgtatctttagggaggtcagccatagtatggggcctgtaggtagaatttatgctgtgagtactcacaggaaacagcttaatccagagattctgcgtatgtgttgggagtatggaatgccctttcagttaattttccttctttcctactttctttttattctacactttaattaagccttttattttctttttttttccgagacggagtctcgctctgtcgcccaggctggagtgcaatggtgcgatctcggctcactgcaagctccacctcccgggttcacaccattctcctgcctcagcctcccaagtagctgggactacaggcgcctgccaccacgcctggctaatttttttgtatttttattagagatggggtttcaccgtgttagccaggatggtctccatctcctgaccttgtgatccacctgcctcggcctcccaaagtgctgggattacaggcatgagccaccattcctggccaggccttttattttcaagcaaattctgtctagtattgtttcatgcccaggaggcttttaatagagtacattttttaaaatttgtttttttagtaccaagtagcattataaagaggcttttgatttttaatttaaatttaatttaatttaattttcttgagatagggtctttctctgtcgcccaggctggagtatagtagtatgatcacagcttactgtagcctcaacctcctgggctcaagcaatcttcccaccttagcctcccaagaagctgggactacaggcacacaccaccacatcaagctaatttttgcattttttgcagagatggatttttaccatgttgcccaggctggtctcaaatgcttggactcaagcaatctgcctgccttggcctcccaaagtgctgggattataagcatgagacaccgtgcctggccataaggaggttttaaaaaacttaattttggagagtttcaaacatacaaaatgagactggatcatgtaatgagtcattgatcctctctccagcaccagcaacctcaatacatggccaatcctgcctcatctacatccacgctgtataaggaaataaatatacatcatctgtatctcagcatgtttctctaaaagagactgtttcttaatatcatcataatgctcttctgcctaaaaatcaatacttttcttattgggaggtattttaaaggatacaagaggagagaaatttagccacaaacatcttgctcaacatatcagcttttttctttttttccccgtgttcagtttttgaccaaaagcatactgatattttataaaaatgatagccatctatgctcctagcagcttttctgggtatacatgttgtgaccggggtaaacattaactgtctgttcctccatctaagaagaataacaggtattcacttcatttggaccatatttatgtaccctgagtaattcccagacctctcccaacttctaaagttccctattcattcagcaagtatttattgagagactcattgcacgtcagtcactgttagatctgggaattacggtggaaaagaagacaaagtaggccctggacttgctgcaatttacagttgatagggaagcagggcttccccacacaaggatactgacatacaccaacagtcgctgggctgcagctgtggtgagtgtcgtggggaagtgctgtgagagtgaaccgagaagacctcaggggtctgaagggtcaggaaaggcgttcttgattcttgaggaagtgacatttcagcccagcagtgcagatcgagggaacagcatgtgtgactaccttgaaacaagaaggaggctggctcctaaaggaacagaagggaggcagtgaggcaggtgtggggttggggatgggcaggggaagtggaaagagccccccatcctgggcctgcctcttccaaatggccctgggacctgagagcaggctcttgggttcctacggctggagaccctgggatgctacatggagacgtgagttccagttgttctcctgactgtagcattgtagtgaaaaaagaactccaatttggaaagacataggcaggcacttgcaggctgttaccctggaagaagagaagtcatactatttacacagtagggtcattgtgaggattaaagaaaatatatattttattatatattatatgtaataaaatcacctgacaacaaatttcttccccctcctctttcttcagtaactttcttcttcacttttcctgtcagggaccatcagctccttgggctgcctcaggagtcctctcccctggtgtggctggtgctgatggccctgctccccagcgggtagagtcctggggccgtgcccttcctgggggcgttttatttagaccctgacatttacacaaatgttcaattcaaacataatgcttttttctttttgccaaaaaacattcaaagtctacaaaagaacataaaggaaaaagtgaaatctcattttcctgaggaaactgtcgttagagagctggattgcatccttctagatgttttacatacacaaacacacagtcttcaaacaaaaaatgaaaatttgaaatttatgatttttcactcagtgtatcttgatctctttctgtgtgtacaactttgagacctgggccactcgggagtgttccacagacttcattgttcctggcattgcttgtgttttccctgctccgtggcggcttcatctccctgcttgggccaggggcaggatcctctgtgtccggccacctgagttttcctgcaagccagtccacctctgaaagcctttgctttgcagaaatgcatttcaccaaagccttgtgttgtcattggcttgttttttaggaactgggtggagtctgtgactgaaagatcttgcttttgtttcctggtatttggggagtttcattagagcttttcctcttcctggttatatgtccagtaaattggggataagttaatgccagctcttgactctgctgcaagccatttaacagctcagttacccaaacttaagcacaaatgtaaggatagcatcagtgcctttggggcccagctgtaagggactcagggggaagcatttaccagaaacaagtacaaggaatcacagcttcttgcatcccatctcttcccaagtgtgggaagaagggcaagaagcaatggttgtagtattttcttactttttaaaaagattacattgaaacgaagcaaaacaaaacaaaaaacaagcaatatagaaaggtataaagaacaaggcaaaagtcaccctgatctctagcgcccctaccccatccatggttccttccttagagacctgtaagtttaatcatcatcacatagttttctagacctttctttgattttgcaaactttgaatgaatgggatcataaagtacttaaagtacataaagaacttactgttctgccacaatgaatgattttcaaatgcaaattaaagttttgtgtgttaaaaaatgctttgtgggccaggcaaggtggctcatgcttgtaatcccagcactttgggaggccaaagcaggcagatcacttgaggtcaggaatttgagaccagatggtgaaaccttgtctgtactaaaaatacaaaaattggctgggcgcagtggctcacgcctgtgatcccagcactttggggggccgaggtgggcggatcacaaggtcaagagctcgagaccatcctggccaacatgatgaaaccccgtctctactgaaaatacaaaaattagttgggcgtggtggcgcgcttctagtcccagctactcaggaggctgaggtaggagaattggttgaacccaggaggcggaggttgcagtgagccaagattgcgccgctgctctccaacctggcgagagagtgagactctgtctcaaaaacaaacaaacaaaatacaaaaatgagcccatgtggtggtatacacttgtaattccagctgacttggaagactgaggcaggagaatcacttgaaccagggaggtggaggttgcagtgagccacgatcacgccactacactgcagcctgggtgacagagtgagactccatctaaaaaaaaaagtgctttttttttttttttttttttttttgtgaatacatggcaagaatctctgtgtaaaggcagttgaaaagttagcaggacagcagaattacctttatggaatttgggtttctgtgctgtgggattgtcgaggtacctgggtcagccctagggaaaactgagagaaggtcagtttgtctgaagtctcagtccttgatcttggattttttcttacttctgtcccttccatgttgtggaggcacctactctgtccccctgcatctaaacatagcctgcagtatggggaggtgcttaatgtcagacagaatcacagagccaggcttgaatgtaggtgtgtgtccataagcaagttgcctaacgtctctgaacttcagttttctcagctatgaagtggaaaggacagaaaggacaattgctgtgtcatagagtggttgtgaacattaaatgtgattaggaatatttctagcctatagtaggttttcaacaaatcttaatttccccctttcctgcttgttaagccttcattctataaaggcgtgttaaggcttggacatgttactgtttctcaagggtatttgcatttcaacaatgaccaaaactttaactgaaggaattaagaaccagccaacaggactgggaggatccttttgggctgaagtcacaccacctcttcctggcttttcagaaatatttcatgaatggtcacaacaggttatgtactaacactacccccttttcttagaacttggccccaggaccagccctaccctcagaggacagtttggctgctagatgactgccagcctcaaccttgtgcattgtatttagtgatgaggttgaagtcatatggagaagctgggataaggggaaagacagcattattaagagcatgaggtttcaaatgcttgctcttcttactaggacaacgcaagtccgtctggtatctttgtgggaattactcttaggtgagtggacaggcccttatatacattagcaaacggtgctcttcctccggggtaaaagcagcccaagcctatgccaaatcaccttggtgaacagagactagatgggatttttgctccctccatctccactgccaggcaatgagtgctgggcacaatttgcataatcatacacagtgggcccgttattacaactgtgcatgaggcctaaagagtcattattctttttttcttttcctactttcttttagcttcttgacctgagcaatggagaacctaccaggaaacttcctcagggtgttgtttatggtgtggtgcgaagatcagatcaaaatcagcagaaagaaatggtggtgtatgggtggtccaccagtcagctgaaagaagagatgaactacatcaaagatgtgagccatttaagagtttttgccccccacctgtattctttttgtagcatgcaagagaatggagttggaagcattgaagtgaatgtaataaggcattttgaaagaattcttagtgttatcattttggctggaaatgtttctgtgtatcttcatggtaatgttaaagtacagatgtaaatctgcaaggaaggaaaggttgagcttctgctggatggatgttactaggtaagtatactcaggagagcagatggcttcctccttccgtgtagggtttggaggctcttgagtggtttttctttattgcacttaccagtcccacattcatccctggcaagaggaataggaagactgtgggtgattcagatcaatcagttgggttgaaacaaatgctaggaagtcaaccacaatagactttgtccaaccaagccaatcaatgccatttccttgtatttagtagtttatttcctatcttttaagttacatgttcttttgagaaaatttgggaaatataaacatgtatgaagaagaaaataaaatcactcataatctcactattcatccagagcaattgttaacattttggagtattttcttcttctctctctctccatttcttttcattccatcctgtgttcccctagattgactgattcccctcttgaccaaaccacccagcttatatggaagaggagatggcctgctctgacactgatgggctcacattacagaccagtggcttagaaagtgcttgtaagaggcagtgtaggggcagggagtcaacctaggcctgtgagctcacagaccttgcttcgagctccagctctgtgtctggcccagcaagtcacttttgctctgtgcaggcttcagtcctcatgttgagattgtgggggttggctgggctttgatacctaaggttaaaaacacagctttgtgagccccattttattttgtgggttttcagataagatgcaaactcatgatgtcttcgcttttgtgtgagtttttaaaaggaacatttcttgttgaatttaaaaaataataaatgcttagcagaaaatatgaggaaaagccagcaaaattagcacgcatatacataatgtatatgacagccaccaaccttaaactcctagttatcccacctttcaaacataattttaaaaatttattttattgtatattttcgagacagcgtctcactctgtcatccaggctggagtgcagtggcacaatcacagctcactgtggcgacacaatcacagcttattgcagcttctacttccccaccctcaagtgatcctcctgcctcagcttcccaagcagctgggactgcaggtgcgcaccgctacacccagataattttttgtagagacccagactggtctcaaactcctggacttaagtgaacctcccacctcagtttcccaaagttctgggattacaggtgtaaatcactgtgcccggcctccagacataatttttaaccattcagaatattcaattcctgaatttcctgttaagaatagctcagacattttaattttcttgtatttttttctcaaggaaatacatagaccttcctcacttaaatgctccggaggtatggctcctcccttagtaaccttctaaacagagtccagagtcccacattgcccaagacaaaggcaggaggagatgttggctaatcctgagctgtggatgacatgtaccaaagacatgtgccaaagacctggaattaccaccctccactgtgatccgcaacttaaaactaactttcaggtccctcctgccataggtggcttcagttccatccctggcctggtcattgcagtatttgcctttgggagggacatgcagctcaagattccacccactcaccactgggagcagcacaagagccagctcagggccacacatgaaagccgttctgcctgcctagaatgaaaagttgtacctttaacctcattttcccaaaatgtttgtacttcatggcaagaaagtagactctatttttagaattcatgtggggaagtctgggggtcttgactctcccttcccccaaatctccaccaatatccagtaacccctaataaacatgctgtctattttaaaacaatgtgcttcaaaattaagccttccaatactatgtcctaaacacttacattctaaccaaactgctatctttaggcccttcctaaaacagaaattctggagtgtgctggagaaaactcccttgagacttcctgccctatttgagggttcctgagtactttccccatcctagggataccagaagaagggaggagacagggactgtttgtaaggtcttttgttgtgttttgaaagtttttaaggtcctgctagccctctgaaagtagtactgtagagaaacttgaacagcgtttgtgtaaacaagtgtttttgggatcacttgaacttttgttatatttactgccttgcgtgttattggtgattactgaggaactgactttcaaatttatgggctccccagggttcatattttacttccttccattccagatatttgattgctctttggcagtcagggccgatagagggaaaattagaggttgctttttggtttctttggtcctcttagccatgagtctgttaaaacacattctacttgtaaaaacatgtgatgggaaaagggcaaaactttgcccaactgtcatttgagggtgataggtgaatttcaacaaaccattttttcttcagagtttatttggctaattaatatttattatgatagttacatgtaattatatataattttatgtaattaatatatattagcatatatttgatatattctatattaatatatgcctatatattttattatgtatataaaatatatacataataaaattatatatatataaattatttggataattcctaactagtttctaactagttgttgggggtgaccttctcccttaatttcctgtcttgttcttaagtttatttttatgtggggtccttctttctttttcttttttttttttttttgttttttgagatggagtcttgctctgtcacccaggctggagtgcagtggcatgatctcggctcactgcaagctccgcctgccggattcacgtaattcttctgcctcagcctcccgagtagctgggactacaggtgcccaccaccacaccccccaactaatttttgtatttttagtagagacggggtttcaccatgtcagccagggtggtctcgatctcctgaccttgtgatccgcctgcctcggcctcccaaagtgctgggattacaggcttgagccaccgcacctggccggggtccttctttctttagagtttcttaaaagttttagaaatcttgtatgaaaatgttatggcttgatctctaactagtatctttgtgggctacaggtgagagccactttggaaaaggtgagaaagcgaatgtatggagactatgatgagatgagacagaagattcgacagctcacccaggaactatcagtaagtcattatctcagttgcttggagatagggaggcatggcaggctcagagtggtccctcagtggctagtgcctaaagatattagagtatctagtgttctttatcaatagaattacattttaaataaactgagaaaattttatcacagaatgaaatttattacctaaagggaaatttttatggtaagaataatcgtattcatattcaaagcattctcaccaaagtcaggagcaaaacaaggaagccagctatcactattattatttaacattgttcttcacatactggccaaacaagagaaataaacatataggtttaaacatggcataggtagatgtaaaactatcactgtttacaaactatatgattgtatacctggaaagctcaagtgaacatgaaatgatgaaagaaaaactactacaaacaagtaaagaatttgttatttgtagcagggtataaaattttatacacacacacacagaggatataaaattaatatataatatacaaagaggtttcaatatacaaaaaattcccaaaatatcatcaacagaaaaatactacatacctaggagtcaactataataagtggaaagaaacaccatgtgcttagaaaggaagattcagcatcataagatccacattactgtaccattttaatatgacccaataaaaagaccaacaggttttgttttttataagtggagtaggtgattctaaggtttatatagaaaataaataaaaagattgggaaaataatgggaaaaaagagcaacgagagggagtagccttattaaatgttaaaagaaagtgaaaaagcctcagagattgaaacagtatcatagtggcacataaatagacaaacatcaataaaaagtactccagaaatgtacccctgtatatgataaatgtagcatctcaaaaaaggaaggaaaatggactagtcaatatgtgctattgggaaaacttatgtgctgttggaagtcttatacctggctaaattcctaaagtatcaaagatttaaatgtgaaaaataaaacccaaaagtgccagaagaaaaatatgtgtgaattcatttatacccttgaggtaagggaatgccttttcttattatgatataaaatcccaaaaccatgaaaagaaaggctgataactttgacaactttgaaatgagaaactcctgctggtaaaaatgtcaaagtcaaatgaccgggaaaaattatttgtccttcgtatcacacataataggctcattttctgaatattgaaagatcccccacgaatcaagaagaaaaaagctacaactcataaaaataggtgaaagatttgtaacaggtaatgtatactaaaggaaagatggagagagctcttttgtgtatgacaggatgctctgcctcacctcatcgtaagataaatgcgggttaaaaccatcccatgatataatttttatctattagacccgccaaagtgcaagagtgggtcaggacattgttcacaggcctgtgggcaaagaagagggttgctgatgaaaatgcaatttgctattactcttacagagaacaattcagcattatcgatcaaaattacagatgtttagatcctttgacccagcaattctattcctagcatttattctacaggtagactctcacatatgaggaaagacataaggatagatttatttattgtagcattgtttgtaatagtaaaacaattggaaacctaaatgtctatcaagtagaggaaagtggacaggcacggtggctcacgcttatgatcacagcattttgggaggccgaggcaggtggatcatttgaggtcaggagttcgagaccagcctggccaatgtggtgaaaccctgtctctactaaaaatacaaaaattagccgggcatggtggtgcaggcctgtaatcctagctactccgttggctgaggcaggagaatcacttgagcctgggaggtggaggttgcagtgagccaagactgtgccactgcactccagtctgggtgacagagtgagaccctgtttcaaaaaaaaaaaataagggaaagtaagataaacgatgtatctctacaatagaatatatgcagttgtaaattaaaaaaaaaaaaaagaaaaagcaagtaatcccttgaaggggagatacagaaagatgtagacggtgaaaaaaagcaagatgcaagaaaatatgtaggaaaaaattgctaccatttgtatagaacaggaagagaagataaacatatcaggattgttctgtgtgtgcacaaaaagttactaaaaggttaatccagaaagtaactaacaactgtttctaattgggaggcagggtggtaactgagcagggtggtaattttttataaaaatataaaagtaactttatacttttgaaatgtttgcaccatgtgagtgtattacctactgaaaaatttaagaaaaataaccttcttctagtttagccaagctaatgcttgtagacatttaaaaaaatttattattaatattcccaaagataaaagtccctgtctatgtgacgtaccttccataagagttaatatctgtgggaaagaagggcagttacaacagtcatgcatcagagttcaatttatggctgggctgtgagattaagtgcttaagtaacacctagtaccttgattataggagtggggctacgtaaatatatctccctaccccatttcttgattataggagtggggctatgtaaatttatctacctagccccttccttgattataggaatggggctgtataaacatatctacccagcccattcccactggcatgtgggaggacatttgtgaaattctcacctgcttatggaaagtcattctgccatgactgtcagacaccaatgactgtcatcaaagccaaagaattggatttgcaatagatgcataaacaagactctgctcctcgctttccatcaccatctcctacacaccctcattttctcatgctagaattgtcccagaaaccctgtctctctgcctactggtctcctccttctccaagtcatcctacctactgcagccagattaagattgctaaattattgctattgaaacacactgctgaacacaaagctgccacatgctcctgggcctggcttgctgcttcaattctgtctccactccccagagtgcacctcctgctctgctgtgccggggctgctttctgctgctcccagaggccacatggggggccttccaccctcagtcctaactgtatctagcctcttaccaatatctaggtcaagaatggcttctgactcagacatgttaaacacacacacccaacaaagacagcagcaacaacagcagcaacaaaacaactctttttttttttttttaaatgagacggagtttcgctgttgtcacccaggctggagtgcaatggcgccatctcagctcactgcaaccttggctcactgcaacctcagcctccggggttcaagcgattcgcctgcctcagccttccacgaagctgggattacaagcgtgcgtcaccatgcctggctaatttttgtatttttagtagagatggagtttcaccacgttggccaggctggtctcgaactcttgacctcaggtgatccgaccgcctcggcctcccacagtgctgggattacaaaaacactcttgagaattgagtgagaccaaagcatattctctccatggtgactacaaagaacaaggtggctgcagaagttatttcaactgggttctagttctaggagcgccacttctgagctgtttgacagtgagcaaatcacataacttctctgattgttttcttccttacaaaggacaacattctgactcctgcacagtgttgttgagagggctaaatgagggtctgtgagtaaacactatccaaaggaaggtgattcttgcccttctctctggatcatgcagatgttgacttttaatttaaagctttactttagatattgttgaagtagatgtggcttctaacagaagaaagttccagcctaactgaagattgtcgtgaacgtgtagggattgattttgtgtgactgtctcctcgatctgtccaggtttcccatgctcagcaggagtatctggagaatcacatccaaacccagtcgtctgccctggatcgttttaatgccatgaactcagccttggcatcagattccattggcctgcaagtactcatctgcttactgctatgacagggcaacccagcttaatcaagagtggggactgtgcctttgcagaaaaataagtcacagaacatccttagctcatgattcagaattctttaagcagaaccactgtgaagactgtgcccagaagacagtgtaggaaactgaaggaagcatttccaagctgagactctaaggctttgtttttgctctctgaaaaggaaatttagaccccgagtttagtgtgagagatgttgcttgcttcaccagatacccgagtggtcctcagcatcagtgcctaaccccacacgtcagccctcttcctccagtcccagtgccacaggaagtgccacctaatcacagaataacacagacttcactaaggacaatctgtactccttcatggcaagcaatataaaaaaggcctgtaaacacttttttataattagaaattattttgtatcagaaagaatcatggatattccacgtcttgtagtagcagacagggaaacagaaagacccggtatcttatatttgtgaaaatgcatgttgttatctcactttgaggcattgttttcttggttgatttggtttacaggagctaacccttcaagtgcttcccattcttactcttacaagtcccctaacatgcaaattaatttgaaaatgttcaaagcaaagcattgtatgtatttgaaatagcttcccttggtcttcatttccaaatgtatgaacaacagtttttacctctcctccaaatttatttggctcttatctttttatcctcctctcaaaagttccaaaacctatttcaaatcctttctggttctatataagtaattttagataaataaattttcatgttgggattctccacttcccctaattctctgataacagttggtatggcagcagtgacaacagcagggctcggccactgtcctggagtgggtctgggtggcctcgtgtttggggtcatctgcgatgcccatttctggtggggcttctgagtcccacccttttcctggctctcttgagtgtatgccagctttcccctggcctcaggccaagccccactgggtctggtttgctcagcagcctttgttttcccttcctcctgtggtcgggggggcttgccaaggctccctttcctcccctttcggacgctgtctcattcccagcccaccagcaagggctttatctcacctgagttcagacttagtcggtatttgtactacatctctggtttttcttcccagaaagaaaaatatatttgccagtattttctggcaattcttgtgctttgccatctggccaacactctggcatttactgcagaggtcagctgtttgagctgggccagctctgacccaggcaccttgactgattcctagttatcatgcaggctcttagtcctggacagccaaaggagccttatagctaaaaccgctgagagaaacagaaagagagagacaaagagagagggagagggagggggagggggagggggaggggaggggaagggggaggaggaggaggaggagaaggagaaggagaagccatctcacagcaggaaactcaacctggtagaggaagagggctgatgcacggtgttaggcactgatgctgaggaccactcgagtacctggtggaccgagtctgaagagagctggcttcttccttatgcaagaccccagcctcttccactggcccactctgtccactttcattattattgacagggagaccagacccttggtttgattccatagaatgtcagagctagaaagaactgagaggatctcagttttatgaatagacaaactgaggccgacagagagaaatgacatgagcaagatgcctacctagtgacagagccaggattagaaaaatcctggtctcttggaccagagtgtaggtttttgtgtggatacacgagtagaatctgtgaagccagtggggctgggggagtgggtggctggtctaggtggtttctaaagccccttgaagctcaaatgttctgtgactccatgcttccaaatagcttcagtattttctttagtatctaatcacctccttcagaaattctttttcttgattcaagtaggtttaggagtgaaaggcttatattgtccaaagtagaggctgaggaattgaggaagcttcagagactgatcatctagacaagagcacagaggtgttagaaacagtgcccaacaccagggttttcacatcttctaatgtgaaattgtagatgactggggacacagtagaagatgactttccaacggcacagattctgtggaggccatttatctctaaggagagttaaccaagtagaaaccaaagcagtaaatagcaccaccatttttttctttttcttttttattatttttttagagatggggtcttgctctgttgcgcaggctggagtgcagcagtgtgatatagttcactgcagccttgacctcctaggctcaagtgatcctcatgcctcagcctcctgggtagctggggctacaggtacacacaaccatgtctagctggtttttaaattttttttgtagttgcccaggctagtcttgaactccaggctcaggtgctcctcccacctcagcctcccaaagtgctgggattacagtcatgagccatcacgcatggccaacactattgatttaaacatccttgcttcagtgcggcctggagcaaaaattacttgtgcggcttggagcaaaaatcacttgtctgcattaccaaattctgttccttagtacttctttattactacccttctctgcctaagggaggaaggtgaaatgtttgcaggtatgtgagtattctcagtcacattgtcactatcctggcaggcagtctagaagcgcagaagggatagctcttttaagaaaaaagggaggccgggcgtggtggctcacgcctgtaatcccagcactttgggaggccgagtcaggtggatcacgaggtcaggagttcgagaccagcctggccaatacggtgaaaccccatctccactaaaaatacaaaaattagccaggcgtggtggcaggcgcctgtagtcccagctactcgggaggctgaggcaggagaatcgcttgaacctgggaggcagaggttgcagtgagccgagatcgtgccactgcactccagtctgggcgacagagtaaggctctgtctcaaaaacaaaaaaaaaaaaaaaaaaagaaaaagaataaaaagaggaatatctctattctataaagctcgtattttgttttctgatttcattgtggcaatttgggaaatacagaaaaaataaataagaaaatagatacccatagccctatcacatagtgaaaactatcattcagatttcctcctggtctttttccccccagtgcataaacatatatttgaaccaatgcttatacatatttttcaaaatgggattatactatacttactattttcaaaagctgttttttttcccatgtgaaatgatgtattataatacttttccttggaaggactccattttaatccatttccatccatcctaagcagtggcaagtggtgttggcagcagctatgggatggtatgggagaggttttcagtccctccaagctacaggggcagacctcttggccaccatgggagacccacagtccctcacagcacagggtcccagactggcagttgctgtagcctaggacagctaccccagtgcttaatgataaggggatgccccagcatgtggtgcagcccatgtgttttcacgccaccggatctggttttgtttttattttcatcctcacagaaaaccctcgtggatgtgactttggaaaacagcaacattaaggatcaaatcagaaatctgcagcagacgtatgaagcatccatggacaagctgagggaaaagcagaggcagttggaggtagcgcaagttgaaaaccagctgctaaaaatgaaggtggagtataaaagcctagatttattttctatgaacttttctcctctttacttctcccttttctcttcccatcttcaacctttccatttccttttctccattctcttcttcattggatttttttttttttttgagacagagtctcactctgtcacccaggctggagtgcagtggtacaatcatggctcactgcaacctccgcctcctgggttcaagcaattctcgtgcctcagcctcctgagtagctggaattacaggcacgtgccaccttgcccagtaatttttgtatttttagtagagaaggggtttcaccatgttggccaggctggtctcgaactcctgacctcaggtgatccgcctgccttggcctcccaaagtgctgggatgacaggcgtgagccaccgtgcttggcccagtttggggcttctccataaatgcccccattgggcatgcctttcttggcctccagtcccttcaagggctctttagacactcaccatggtgctgttgttatgtaactgagaagacgcttgggatgcccacagatctgggacgtcagaagccttggagatctcttccttcactgtttagattttctttgaggtcccaaggcctttctgtttggcttgacaataaagagctgaggggcacacaaatagctggtacttgggctgtaccccaagtacaatattctcaagaagaaaattggtgggtgactagggacactggggaatgtcccatttggccccctaggctgggagcattccttagctgaacttctaatgccctagaggcattagtgcccctcccaaatttaaactgtggatagacttcctacccggtgacaggagcagatccatgaatggctcctggagggcacttaataaattatatcttggatgaattcctttttatgtaagtctgtggtttgaaaattttgctcagcacagacttaggctatcttatgagtagcgtatccacatagtttattgctcaaagcagaatatgtgagggagtgaaaggtggtactattggtaatttagttagggagacaaactgggaagtgtgggccccttcacaggggtaggctgggtggggaagaggggctgccggtccaccgcccggtctctgtattgccgccctggggatctgctgccagttcacttggcctgccacagccatgggacagatcatctcctctgtatgttcacttctaatagggcagctcttcttttccgtgtaagagttactttctcagtaagagttacttggggggtgaaaaaagtttatgttgctaaaaaagcctgaaattactgatttaagtaatttttttcagcttaggggatttattcaatcattcagtccacaaatatttattgagtgtctactctatgtgtgtgtcctgttcagtcctgttggttccagaggtggcctgtcaccaggcatctggggacatcattaggctgcttggcaatctggctgcttccctggagtccaggcctttaactccagcccacagttgcctgttttagagactgatgcttgttttcatcctgacagtggagttaaaaaggtttctcctactcctcctattttactccccaaattgggaaaaaaaaaaaaagcttcaggaactcagggtatgttacatgacctggatgcagagtgaatgggcctccagggacagagcccttccagcaagctgtgcgtgcactgcaaatggagcacacagcacacagggtctctctcagctggtcataagctctgctcaggactttccactttggaacttcttggtgccaacacttacccagtgatgagaagggagaagtcaagggcgtcaagagagacttgtcacatcttggaaataacatcatgtaacctattgagtttgaagaatgcttcccttttccagagtttaggtatgcagcaaactcagctctctgcaataggcgataacctggaaggaggggatgagagcaaaccttctgcagcataaaatcaatggcgggaagtctgtgtgtgagaacgtggcctggcaaacaggaggcaccagccaccaccaacctaagccctgcccacctgcaactccactgactttttctcacctcctaagccaggcctgcttcagtactaggggtgccagcttagtgttccccatgctaggttggaatgtttccaaaagcaacatttaggaaagcacaagggtatggaaagggtgagtccagatttctcctttgagcttagctggtcttacctagaaactggcttggccaatgcaactgatgagattgcgtagagaaataagtttctaccttttgaaaaagtcactcatgtggagcatacctttgtcctgagaatgcccccaaaattcgtgtgaaatgccacttttatttttctgtggctctgctcacccctcttcctccctttccctgttaggtcttgctgtgtctctctgctgcagaacccagtggatgggctcactacctctgtgagtccccacatgaaatgtgcagtggaagctgccaattcctctgggccctgcaaaagctgtcgttctgaaatgagtctcgttgtaggtggaatcgtcccaagaagccaatgctgaggtgatgcgagagatgaccaagaagctgtacagccagtatgaggagaagctgcaggaagaacagaggaagcacagtgctgagaaggaggctcttttggtgtgtgtgttgtagctgccgatgtaaacttaccgggaattgttggttcattattgttggtgatgtatacgtagtagtgtttattcttagaggtgggtcagtagactcagccatgggtaagggatcaaggaattattcatctgctcattcactcccctcccctcttcccctctgcctttattcatccccgtctctactcagaatagccccttgtctctgtctctaaatacacacctttttctagctcatctgacaatttgccagcatctaagcaaaccctgggcttgcccgcagctgtgccctccctccctccatttggttctctctacctgaaatttcctccttccctatctttgatcttgcctaagctccctaaaagccttaaatgccactctctccatgcctggagtctcttccagtcatggagccagaaccattatctgtccttaggaagctcactcactctctctctgcttttactttggaattcttttatacctgccattagagtggggctgtgcgtctcacatcttggcttttccaggagattataagttcctgaaggcggggactccatgtctggctcatctgtgtccgtagaggcttaatacatgttctgatgattgactgggttttcttgttagtaatgagctgatgtattgcattatgggagaaggatctgggaattctgcattcaattccagatctggttctaattcccttacacttctggcaaatacagtgacattctgagcatctactcaatgttattaaacatttgtaggcctcttttacaccttttggatataaagacttaagggaaaaaagggaaaaaaatgtagtgaggcccattaaccagccacatgatgtatctttattcataggtgagaaccagaaccgtgaggttgagttcatgatctgtgagacactttcaggttccaaggtcatgttttaaagagaaatcgtgatctagcaaggcctgagctgattggatcccggtgagtagcctcggtactccatgcctgtacttaggagggtatatttcttttgcaggaagaaaccaatagttttctgaaagcgattgaagaagccaataaaaagatgcaagcagcagagatcagcctagaggagaaagaccagaggatcggggagctggacaggctgattgagcgcatggaaaaggtaggacacagcgttgggcctattgcccacttgcccaaacttttccctgtaggtccatctgagatacgagaggccctggatatggattcctctcacctccaaaatttgcaattaaaaaaaaaaagacaaagctataaaataaagtataaggaagtccaacaacgttctcatttttcccatgataactattttgatgcttttaaaaaatattacttgtgaaattctttagaaaaattaatattttagcagccttgctttgctggtgccccaggtgtgaacttagtttatccattgaattatcaagccctatttaggtgttacatcaacacagcagccctgttgtttctggggcatgtgtctcaagggttggcttttccttgacacgctggggacttgagagagtagggaggccccatttctctaggtgttgtaagcaggctggtgagtgtggtgggggaacctgaggaaggcgggagctcagctgggataatgaagcctgtctagtgaaagggaagaggccaggaattaagtaggaagtggaggaaggggaggaagtggtgggagaaaggaaagaggaaaagaaggaagagaaggaagagaaaggatgggtgacctttagcaggtgacggctgacttctggacccaggagttcagggccaagtctgtggctggtttctgggaatggctccctggctgcatatgagtttgcagagagcagtgacctgccaagaccctgacattattagcaccctgtgactcattcgggatgccaagaatctccaatctgatgatggaggcagaggtggggcagcaagagcaaggtcactgtcaggcttcatgtgatgctgagaagaggtcgccttagctaatggtgtttgcagcataagcccctgtactgtcccctcataaggcgaggtgtcgccactatgggaactgcatgaaattcagttctgtggagcttcagagctcactgggtgcttcgttttagctctttagctttttacttgggagagacttgggcaaactaaagagtcaattacaatctcccttctaccccctgggaaaacagaatcccatcttttattgaagagtaggtgattggcttagtcaggactaacattagtattgaccagagggggtggtggtgaagattgggcaacaagggagctttctagagcttgagtgagcttcctcccacattattgtcctcctacaacagcagaagatcccagttaactcagatgctctctctctgggcagcaggtttttctgcagcgtaaagaagcaaggtgagccggcagcatagcagggtggtctgggggagatgccgtcatacagagaaaccacaggtagtggtcatgaacataggctttagaatcagacagtctggggatttgaatcttgtgtctctttgtagttgtttgcacttacttggtttttcctaactcagtctccacttctgtaaaatgctgataatggtacttcttattcttagggcttttgtgagcaataaatgagaaaaatccacgccaagtgctaagcatggttcctcgtatatagtaagggttcgatcatttgtggctatgatttttactctgttacgaggttgcctaaatgtctaccctcagagtcaggttgtctttagcacgacccattttatgcttatcttcattgctgtcttgaggttctgaaagtttcttgtctttccccactgattttcacatggagccctcatgtgggatgaatgggtagagccaggaagctggtaaggccagccctccctgccagcatttaggaaacacaaaaccttccccaagtggtgttggcttcttctttagtgattggaaatgtattgtcctttctctaaatcttcctttccatttaggctagagaaatgctctatttattgaactaacattaggtaggccaatttacactgtttccttttcagggataaatctgtgagagcaggaatctggccaaatcgctgtctcacactacgtgaacggcatgtcctaggcagggctgtggcagtgtacgtatcctgctctcagttttggattttgctcaaggacaaaccatgtgcttttgaatggcttctctgccatatgccttagtttactgtttctcttgctgagcactgtatttcaaacacctttttttctgatcagtaaaaatcttttaaggagtgttctctaccagggacccttctggggaacagataatagtctatgccataatctgggcagtggtttcacaggtgtttacaaatgtaagaaataattgtgcagtgtacacttaagatttattgtacctcaatttaaaacaaattttaaaagtgtgctgtaagttagaccttgctctactttatgacagcctttttctttcttgttttttgttttttttttctttttggagggaggcattcacttgtgaaagcttttatcactgttatttcggggctaatgtaaaacttccaaccacataggggcaggaggaatgttctgctcaggccaggccataagaatgtgcatttgctgtagagatttaaaaacagtaacaaaaccccagtcaaagttgatctacctttgttattttaaatatttcagagataatatattcttcctgcttaaggtggactgcttccccacccctttggcctacctcttggtataccactgcttatagcttcagaagttgtggcagttaaattttcaaagatttgcttttaataatttggtagaaaagaggtttggaatctatgtagctagtaagagtttgctgggtggaatttccgaacataaagatgaggaacattagttcttagagaaggacctaaagtaaaataatctcccaattagtgagcgttatttgataaacttgcattttaaggaaatttgttacactaacatctgtaatgtatttttagcacaatttcggttatgacaggcaccatgtttttatgaacatttttcagctttgtccaaagaaatgattccagactcttttttgggcaaacttctaaatatacatatatatagcaaagtgtacaaagtgcacggcttagtgcgcgtatgtttcctattgctaccatagcaaatttccacaaggttagtggcttaaaacaacacaaatgtattatgttccattcctagaggtcagaagtgctaaaatccaggtgttggcagagctggattccttttggaagctctagaagggaatgcatttccctgccttctctaacttctggaggccacctgtactcctcaacttgtggccccctcctgcagcttcagaggcagtagcagagcatcttccaggctccttctctctgattctaaccctgctgcctcctcctccttagaagggcccaactggataacccaggatctccccattttaagatctttaacttaatcacatctgcagaattcctttctccatgtaagataacacataggattcaggaatcaggacatggacatctttggagggccatgaatctgaccacaacatatttttacaagtgaatacacctgtgtaaacaccacaagttagaatataggatattgccagaatcccagagcctcttttcttgatgattcagaaaataataaagaattttgcagtatcacaagccaccagtttaaagtattgataatcagtatttggggctataaattttcactgatcctgggctgatggaatactttggaaaatgaatcttgaatggttttatttaggatgttttgtctctgacccataaatatatctataaatacacaacaacagacttggcagttttgagccttgtttgggctttgctgagcaggtgtgtaaaacccagggggtgtcatatagacttggactccctagtgctagaattgctaaatagacattctctgtcaaacttgggatccattgattaaaatatcagtttctgtttgttttaggaacgtcatcaactgcaacttcaactcctagaacatgaaacagaaatgtctggggagttaactgattctgacaaggaaaggtaagacgtaatgcctttcgtcttgtaatggatttaggttgtggacacgctgtgtttttatgacctcatttgacccttacattttcatttgtgtggttgtaccttattacagacttaagcatacataacattgggctgagagtttccaatatggaacaagtttctttggaagcctccagccacatcctgcagatcatggctggttgttagtgtagtggaacacatcaaatactttcacaagtgcaaaagtttggtctattaatgttctccatggccttgaactccacaggatacaccttgttgatgagaaaactcatcagctgtgactaataccacttgctttggaaaccaatttaaaacatctttctttgtttccaaactttgcttagtaaaaccttgcattatcctctggcagtgagtatataaagccctacatgaaaaacacggaatagtacgctgtctgttctagaaatcaaaatgcagagaggccattcaggggtctctagtgaaggaaaacaaggttgagatgatttgagtgttttgggcaagtgacttaacctccctgagtcttgcttgtgccacatggaaattcatctttaaacgggggagacgggtatgacggtgataacagtgcccatctcactaggttactgttgttaagagaactattgggcttgctgcctgccaaatagtacgtgctgaaaaaatacccatttttccttcctcatttgcaatttcagagttttcaaagttacaggaggcttgctagtcattaacatagtgctgaggcagagatggggcacgggaactagaccaccagacctttcctccagtgcccagccccagcggccccagagaactgaagagtccaagcaatgttggagaataaattgtgctgttgtaaaacaaaagtatgaaatgttttgtgatgtggcttgctctgtttggatgtagagaaggtctttcaacttgtcccacatttgccaaaaataaaggatatgtagagcaactgtgattccagaccttttggtattctgccgttgatttcagatattttattgtgttgctggaccccttcttccccgtcctcccctccaagtaatttactggatgttccaatatgttaataaccccaaaacagagagcttctcagatctgtaaatggtgcaaaaaaattatctctcagcccctggaaaataatcatccttatatgggataaaacttgcaaatgggaacttgaaaaatagtcctgtgctcctctgttgtggtagtttgttagtaatcacactactttgtgtggtcatcacataaagtaagaagaatggatcttagagtttgatttcttgttcttggaagcatttttaaatgtttttaaatttacgtttatttttttaccaaaccttccccaaaagatacatgttttctatttttatttatttattttttttttttgtggagatgagggtctcagcatattgcccaggctggtctcaaactcctggcctcaagcagtcctcctgccttggcctcttgaagtgttgggattacaggcatgagccgccatgcttggcgctcttggcaatattctttaaagctgtgactgttgctactgctgttgctgctttggtttaggactcatttgcttttttctcctatttgtgttaggtatcagcagttggaggaggcatcagccagcctccgtgagcggatcagacacctagatgacatggtgcattgccagcagaagaaagtcaagcagatggtcgaggaggtaagcatctgcaaaaggtcacaggcctgggattgcttcctgtggtggggaagcatccccagaacaagtctgccttgcccctccatttcctgtggctcacaagccgaggtgctcaggccactgccatctaggcccagagtgggatttccccacatgtcccccatggactgatgacgatgatgcccctaaaagaggggtttcctcaggtcaaagggttacagttaagaaagctggaaagtgcagttcataagctcacccactgtgaaaggacagtgatagcctgagtgggtacccacagctcaggggacccaagggggtgatgggcagggtgaatttagcccaggtccctgcactgcctccacagccgtctgtctgtctctctctctctctctcagctaccattcttgtcctttatcgttttctgggtgtgtctttcattccctttccttgtctgtttctctcttttttctccctccttcctcgttctcttctcccactcctgcttcttcttccttttcctttgccaccatcctttctctcctaactgtctctgtaacaggaaaccaagctatacatttactgtttgggcatagtttactattctcttttttctaaatgagaaaacgggtaagttgaacatttctatttctctaagaggaacaaaatttgttttaacttgtgtcaatataatccgcctctcttgtggtgatgttccaaagaagaaagtccgtgctctgtaaagctaatcacatattattgtagttttcttcttgctcaattaaaaaatccgattgaaaaatctgatagaaaaagagcagttagtactaacagggttataagaattcccttgagtctaattctctaacctgcaaagaaaaaaaaaggtttcaatttaatcaaacatttggttggcagtggaaaaatgaaaacacattttccttatattaagtactactttaaaaagttatgttttattaatgaattattaaaattaaaagcatatctacttctaagaaataattcatgtacatgacagacaaatggaagattaaaatatatctattttattaatctctaagatattggggatattaatgttggggagttaaggtcagagaattgtgagtatgggaagggacatctttttttattgtgtgtaggataaacatacacattagataaaagtttgtccgcaaatgagaagtgcagttatactgtgttgaatcatgtacatcttatattggttcacacacaagtttctggggagcagtggaatagcagaggaggccacgcacgcatctttgcaatcgttttgtgcatccaggcaggagcactgcccataacagtaatgcggagggagatcctgccctatcgtcaacactaggtagatgtcaggagtgtattttccaaggaaaagcatcactttgccacagttagcatctcagtgagccttggccgtcggggcatagtttttctgcttttgaatttcacacgcacgaagtctggggcaagggcatcccttattttcccctatgcgagtctctaactgtgagcactacatttctcccacctcaccacaggggggtgtctgtgtcattcttgtatctaatcgttagagaactattgaacaaaacctcatactggttggcttctgattcacttaaacccttacctgtaagaggttaaggctgtaccagaatcagagacattgtttttttaaaagacattttcaaagaagtttagaattctctgtttcctaacttacttccagaatataacaaacctaccaatttgaagagagtgaaggagtacacatacgtacacacatatacatatgtgcatatgtatatgtgtatttatacatgtgtatacatatgtatatgtgtgtgtgtagggatgcatataaagatcactgtccatgctttgcttttttctacctgtgatttcatatcttccagataagcttctctaagctttgatgtggtctgtggtctggaaggcccagtcgttggaaagaaatcaccagctaaaatttaggatgccatcagagttagcaccccctaggggctggctgggtttccacagtgaatgtagaccaccaccaccaccagcaacaaaaagagagagagacactttttattcctaataatttttactgcctgatttagaaagtttgtgtttgcccagcatactacattaacttacataagaaaaaaaggatagcctagaatctcatttgctatagccatttatgtgaatattttttttaaaagttagaaacatggtcaaggggcatggacaggtgagcaccttcagaagagcaagaccaggttggaaaggagttgagaacctgagtaattcagggaactggggaagacatgcccaaggagagatgggagctgaattcacatcttagaaaacatgagggaatatgtctttgttttgtattgtgaagcaaggccaggccagaaccactgggtgacactttcaaagaggcaaattgcagctcttcattcacaacaaagaaaacatttctaatactggctgcactggtaaggcatttagctcttcatcatggttacgttctttacaaagtaagaagttgatttagaagttctctagtgttcctccacaaattctgtgttctgtaaccttaaagactgtgtggaggaagtctggtaacttcagttaagtgttcatcatataaagaattctctattgtttactatgctgtgcctgtttttgtgagctcagccttatcattatgttgcataatgagcaaaatcagcaaagtcgtaactaaatcacttcagatcacttggagcaaattttgaaaaatccggagtactgaattggtcacttgtgaaatgaatcttgaactctgactctagaagagaagtatgttttcatctgtgaactccggctccccaggcatataggcagcctttaagtgtagcggatgttaaggaccctttttcttccctcacatgggtctggaagctcgtcttcatcatagcctcactttcaccatggatggaagtctcgtctccatccattgttggtatcattttggccataatgtccatgaggaaacttagtttttttaaatgatgggcttcttttgtttagctcaaaatgtccaggtgtcactactgcgatccttgggaatccttaaatgttaagcaacatgtttcttctcaccttagtggagtatcattttatcatagtaataataaataataaaaagtaactggcccaggttttgtcatccttagctcattaatgacttgatttccatggtgggagacagtaggacttgtactatgtaggaagggctcatggtgggggtgagcccttttgaaatgaaggattagtatatatcttacggtgtcaaggtcattgagaaaagataatgcaaaacgttttctgtgaaatgtggaaccaagtccctctcactaggctagggctttctactgaattaagtctcctgtcatggatgtcagggggttgggtatctcccccatcactagttcttccagctgattctggctttgataaaaatgagagaacaaagccaaaaaagccccacgtgtgcctcttatagccggaaaatatagaaaaatgccgagggattggaaagaaaaagccctcaaggggaaattaattcattcatccattcagcagatacccaccagcacccgctccgtgctggggctgggtacacagtggggagtcaagcagacatgggccgtgctggcacggatcttacccactggtgtcacccgagttccagggtagtcttgcctttgggttttattatcctgttgaaaagctttgttgggattggtctttggtcctgaatcaagctgcattctttagattgccaggaaaggcactgggagagctgggaggagtgtaaaaagtaagagagcatcctgaggcccccacagtgcccctctgctcacacatctttgagtgtgacttcttcagtccacagagtcattcacaccctctttacctgctctcaccatggctctcctgctgccaaccaaagcagctctcctgccaaggggaaagtgatcttaaggaaaaaatcaactatttgccttccaagagggtgggtttacatttttgccaatgggcagggatattgtttagctgaataaacagtaatttcttaagaggttttttttttgttttttttttttttaagctatatcccagtgcagccattaggcatcctttcattttgtcatgtctttcttttgatttccctttgccatttgtgatataggaaatgtttcttccaacagggtctgaagggagtttcttttcatttgcagaggaggcattttctttagacttcttttgctgaaagcaattacactctaccccactttgctataattgagatgtttaataagtgcaaaggtgcaaggaattgattttctcattagtgcttctccacccaagctacacattggaatcacctggggagctttaagacatgcctgaacctggcagatgggatggaggcagactgagcattgggttttgtttcgttttaaaaactctgcaagtgattctaatatacagccaggattgagaatcgctgtcccggattctcagagcggtggcctgactctccttgctgggtttcatgttcatgcatttggccagcatccctcagaagctcctatgcctgaggtgggaagctgctggtgaactcaataggaagggctcaacagaaagcaagccagggagacagtcaccagggaccaggagcacagaagtgagaaagctggtccaagtctgtgactctctgggcactgtcaggggaccttcacttcttgccagcccctggtcctgggaggattctgtgacagctcactctttttttattttttattttgttttagagacaaagtcttgccctgttgctcaggctggagtgcagtggtgcaatcataccttcctgcagcctccaactcctgggctcaagtgatcctccccactcaacctcccaagtagatcgactataggcacgtgcacccatgcccagctaatttttgtattactgttattattattattattttttatagagacagggtttcactatgttgttcagctggtcttccaactcctggcctctagcaatcttcccatcttggcctctcagagtgttgggattacaggcgtgagccactacacctggcctgacagcctaatcttaatagctgtactggcctggtggtatccagataatacaaacttcccaaaggctatttagacccatctagagagatgttactaaggtgggaagaggtacgcttgttaaatagataatagaaacttaaagggacagaatccaatccacctaagtccttgaaagctggactaccactaagagagactaagggtgattctcatggatcctcttccaactgtgcatgtatgcacgtgtctgcctcgccctgctttaaattattcacttctgtctgtacagaagacgttacacttggccacatggtacccctttagaaagagaaggcaaaaacatcttggttaaataattatattagcaatgaccacttctcaaattcaaggcaaagcagaatattatttgtgattcctaaggaatgattttgaaagtatttaacggtcatctcttagattttttttaaagagtgatgctgtagtcataatgcagcagttccttgggggaaacaaactggatcagggagaataacagatgagtaagaactcttcagagagttgagactttgagtatctggctctctagccagttggccaaacaaggctttacattactagtccctaaatccacatgcatctgcagttagagacctttatgtgtctacaacaaaagatggcctagaaaaatagcaacaagtatggactttagcatcagacaaacctgcctttgaaaagttattagtttccttgtctataaaatagggttaataatagtatctacccaattttttgtaagagttaaatgagatgacatgtataaaatgcacagcatgttaattggatcataagaaataataaatattagtggctgttattattaccacctgtaaatgggttcggctgtgtatacctaaagttaagtgaactaaaagcaaaagtagctattgttgatttcctgagcaatgcacggggctgccctttatctttccctttgggagtcttgttggccacattcaatctttgggtatacttctctcttctcttttgtgctctgtgctgttttctagcttagccatcaatctcttcacaagaatatttatacaaaaagcgatttttaagatttaaatttgcttcatcgcaagtatctgccatttttacatggttcagtcatttgctggcacacaatttaattcaaaactgttgtgtggtgtgctgaaatgtgcaacacacgaaagtacattttactaaatgccctgtgtttagaggatttcaagtacttctcataattggtaattagccaaatgggggtaggggaaaggagccatagcaccaagcccacaaacctaatccactcaattgaactgtctccagatcatgtcgcacgagctcttctccagatttagtctccggctctttggaagatgataagttggtagcctgctctgggttggaagcgattcctttattgttcgtgattagaagaacacttgtacactctctgctgggaagaggtggtatttatctatgatgagccaatgaacaaaacaggaaggacatattatttaaaggaaaatttgaccatgtggggctcttgtttgtgaaaacacccacatactgtcaccctgacttgtacagcctcaaactgcagagtcaagagaactcacagatccacagagtatttttaggaacttgagtagacattgaagaaggaactgcaatgaaaaaggctactgaaaaaccattcagaaagatccaggtggaggcttggaagatgaatccttacttatggaaaagctgccaaagacatctgctaaggagatgggaagagagcttgaagaatgttagtgctctgggaaggaggtgctcccaccagatcacccccaagaaagtacaggagcagccaggtatccatgtggtttggttctatttgtatatgggaggtggccctgaaggtgtccttcctgaatggatatcaatactcatcttaggactcttctaagaggagtttagcttgcttctatcaccatcagcattttgcctgaattggttcaaccaacttcacgaaaaggagtgtatctgataaagagaaatctatctggctgaaatatgttgaactgaaacatccttcatgtatgttttatttttatagaggtctttcttgagattgctgcaggcattggtgttttatcagaacatggcagttttgctgagaactagcagtagtagctgcagtcatagcaatgggtggcatgagtctacataagctgggagatggggctcgtggagtgagtgcgttcagaggcccagtgtccctcagacgttggctagttctccactcctatcactccttcatggcaaagcaggcatgaagctgctttcttgctaatatttgcctttgctttcatttagatgcttctacccagcttaagcaaggagggaggggatgggaaagaagcagatgaatacttttccgcattagttattaaccattaatattgttcacctgtgcacggtgctgtgtttagacacagatccccagatacgatgctgggtattcagacttccactagggagacagaggcagatttgagaatctcatctggatgttagcttagtgttgttacctacactgttttttagggacgcctttattgctgtaatgtttttctaagtctctggtggaaaagtcactggcatttgttctagcagcattgattcattgccaagttttaaaaaaggaaataattaagagaatgcaatgacctttagagaaaacaggtcacccatgtaagtcctgctttcagggtggtgtgctttcttctgcttttagagtttcttttctcttttgggctatgaaccgtacctggaggccaggcaggccttattctggagcagatagtgagtgaggttcctagagtactgcatagcctgagagtgcctcctaagtggatgccctccacacctcctgcacttggccctggccctgggtcctaggctcattgttgatcttcttagatctgggttccttgcattgcaggacctacctcagcctgctcttgtctgcctttgctgatgcccctcaattcacctctttcctgcctgtactgtgatatggtgtgaacttgacttatactgcttgtgaaacctgagtcatgtgctgaaatcctgccccgccaccgctttcctcccttaactggatccttagccttggactccaaggctacagctctgtctcgtggccactcaagccccacccaaaggaggtgctactcaaaagtttgaggcaggagtgatttattgtgaatgacaatgttatagtttctaattctagtgtttagcatggtattattccttatttattttaaaatcttagacaatttatctaaaatgtcaatttttagaaggtatcagcacaattgtggcagccttttttctgtatgtgttatatgtattatttaaaaaagcaggttcattctatgacaggtattggtttcggtattcacaatataaattgtcttttcaagggaaaggatattttctttggaaatgtcattgaatctatgttctctttattgaaattgttctaattgactttgaactgtttctcagacacctggtgcccagtttctggccatagaaactatgtgaggctgagtaattcatgttttgggtcactaccagtcacgaatgcttctctcattccaaggctatgcatatggatgtcacattcccatgtcaatcatctctggaaggtattattcgcccagttttttaagcatgggaaactgaggcttagagtcttaaaaaataagtagctggcagtctctcagcaaataatgatggtgctgcactacagacccagatctgtgactccaaagtcagcctttgttcttttcttcttgttacttttaattggaaaaaaatttaaattgcaaaaagttgtagagtgataaaaacaaaaatccacgaatgctcttctaggattaacaaatgttgccattttggcacacttgtttctgtttttttttttttttttaaagaaaagaacacatcacagataaagaagaggttctctttttacctgtccctgattctgttccttttccttctttcaccctctcttcttctcagaggcagtttggtctctaggccatgccttgatgattttactgtgtatatatatatataaaattagtatgtggcttagtttgtgttttaaattttacgtaaattttaatttataatattaaaaataaattgtattgtacatattttgcaacttatttctcagttttgtttctgctgttattccacatagatctggattattcatttcaatggctaatatccttttatttgaatatattgtaacttatttatcctattgatagacatttttattcttttacaaacaataccaacatgtctccaggcttctctaactaggaagtatacgtaaaggaggaattgctagggcatgggattggcataatttcaccttttctagatattgcccaatcgctgcccacagtgcacatacctttccaccagtcacatgtgagagggcagattttccaaatgctcatcaccacttggcactgtgtggactataattttggccagttaggaaatggcatctcattgttttcatcttaatttgcgtcagcctgattactcattgaaacttgtgaggttgagaaacttttcttaagcttattggccattcaagtttcctcctttatgaaatggttgttcatgtcatttgctcatttttatattagattgtttttcttttttccagctgacttgtaggaactctacatcttatcaatattaatcatttatcgaaaactatttgggtgccattatcttctcctagtcaatgttttttgtttgtgatatcttttataatatataagtttttaatgttggcagaagtaaagttaatctttttggctgtgttgtgtgtcttgtttgatgtaaagatagtttctgtaatagttttgcagtttgattgttcatctttaggtcttcaattacaacctgcacatccatcccctctatcctctttcttactctgtttttctccatagcacttatcatccaataatatgtcatgcactttatttatctgttttgcatatatattttgtctgttacctgtttccttccactagaatgtaagtcccatgagggcagggacttgcatctattttgtttgtggttgtatctctaacacctgggatagtcactggcaaatgatagttgctcaataaatatttgttggacaaataatgatccatgtagaatttatttttgtgtatcatatgaataggactccttttatttttggctcacggaaagcttgtttctctaatagcattgccgtactgatttttttcacgtcgctttcgtcaagctggagttgtttcccctgtgccattgtctttgaacaatcctgttttcctgcccctctgctgaagactgaaggaaactcattccttgggcttaagagtgggaataaggatgaggaggagccaggtacaatttatggggagcttatgggacagttggtacacgtttaagaagagcctcttatgagcatgagtgcaaaaatggacatgagttcctgctctcagaggaccttctggctgacatttaaactcatttgaacttgaggcagaatgtcataggtgctggaaacacagaagctgggaaacttagtggttaagttcataggctttgagtaaattcagtctgcttttgcatcctgcctctgctactgactaggctttgtatcttgagcaaattatccaagattcagtttccttatcaataatatgggaatggtcataacattacctcctcaagtggtagttatgaggattgactgatgtgatgtgtgctaaatgcttagcatagttcctgccaggacaaactaattctgatgtgggtggagagtctttagggaggaggtagtgtttgaccaggccttgtaggatgggttggatttttctaggcagggattgaatgggtggacatgtcagacaagatatagaataaataaaagcaaaaacatgcagaccagaaagtatagggtgagttcacagagcattcatctagtttggatggtacgagggagtgagaaatgaagaggctagaaatataggttgacaccaattgtgatggtttattagcaccaagccaagaaggatgtccttcatcactctgctcataattcctcaatggctccccattgcctgatcagatatgagctccagagtggtggctctggccagtgggtgctgggtgaataggaggggagaggagcacggaggacagcaagaaggctccaaggagagccctggctagtgctagagagtgtttactttccatgcacttgaactttaggaagcgcttccaaaatgcaattttttagcatcagctttgtgccagatgtggagctaggggcttccatatatatgtattacatgaatttgaagcagttcactcccttggacactcctgttcaggatttggtgttttgtctctgaaactgaattcatcgagaaaagcacaggggtaaataagcttcatccccatctccattccatctgcctcctcttgaatcatagagggaaaaaaaggacagcctaaagaattagggccccagcagatcctttgtgacagaagatatcacatgtcaaccttcctcccagccctgccaactctccaggccagctttgcagccataggttgtcatcactgggaggatggaagcaagcaaacctctgaacagggtgtggtgtgaataggacagcctgggccttgccctcacagatgcttacttgggtcgtaatatcagccctatcagcatccagatgattgtgaagggagtgaatgaatgatgaaagtcttggcacctcagtttcatggtctggtggggataaccacatagggttgtttctgagaatcgtgagctaagccagcaaagttcctggtagcttgcatgctcctcctttcttccttctcagagaatgtgctcagattgggaagcagtttaaccgtccttccctgacatttgtacagccaagtcatgtttaggtacccgggggagccagagtgctcctcctctccttctggagaagttgggttatctttaatataagatagaaatcaaaccaaattacattattttacctcagaaccccgttgcaaccgatccttttgaatggtatagttctattattatatattacttcaaacttaataggaaaaaattgattaaaatatgtgccatgttcatatctagcctggctgaatgccacaagacacattaattgaaaatgaatttccacaaacccaatcaagcatcatgaagatgaaaaatgtacctttttccctccattccttcattgatttttcattttccccactcagtgcttcatttagcaatttttcagtttcgttttgttgtggccttaattcatttcctttactcccccccaaatgagataatgtaccattttcttcatgcttattaaactcttctttcatgctgcattagtgcagggcagattctgatcttgtcatatttctctatgcattattttttttgttaaaaataggctgagcttttttctttttattcttacattttgtggtggcttttatcaaagagaatggactttaaaaaatacagtaactatgaaattacgatgttacaggacttccaaaatagaattaaggaatgctatgcaaaaataaaacactttttctgaggaagagtgtaaaatatcaattattctcatagtcacagtgggtatgtggggaccagacacaattcctcttttgttaagagaattggaaacaatggtttaccagatcatagagggatcaagaggctgggttaaagacacagcactgtcaggaaaagagcaggcagagggagacgacggctgaagcccaagtgagctctagaaggttctgtccctgacccagtcagttcaccatttccctggatttctaggggttttgaaaacaataatggggatcttcaaagtatttccttgtaaaattttcaaattttcaaataacgtgatggcataaatttcccctgaaaaggctgtaagaactcacaataaagtatcatattcctctcttttgacctagaattcatagccctagtaatctcgttttgattagatgctttgattggcagttatacatctttgataacattttcaatgtgaaatgaattattctttcgttaaagccattttaagcagaatgtctataaatgagggcccacgagaaggaataacaaagcaggggtgttggggatggtggctggggagctttggtgtatttattaacctgtggttgagttttgcgatgtgtgcaagtacacacagccccgacactctgattttgaaaacaatgaaatgaaaatgaaatgaaaacattataaagaaatttcaaataaaataatttaaaatgtttattgcaggggaagtttatgccattacattatttgaaaatttgacaatttcgcaaggaaacagcttgaagttccccatagaaatccagggaaatggtgaactgactaggtcagggatggaattttctagagctcactcaggcttcattcatttaaaatgaaaacaaaataaaacaaattttaaataaaataaacaataatgtcaaataaatgttcaaataaaataaacttaatgtggatttaaaatactgaattccattttccttataagatttaaacagtttgattaaatgtgaccatcagttttgtttttcgttttctgtttttaaagagtttatttgagcaggcagcaccaggccacatgcaattgagggcttcacctagggggcttgaggggaaaacttttataggtgtttatggaagcaagacaaggaaaatatttgattggttaaagcagaaagtccctacttaggccacacctgtaatcccagcacttcgggaggctgaggcaagaggattgcttgaggctgggggtttgaaaacagcctaagtaacatagcgagaccctgtctctacaaaaaattaaaaaattagccaggcatagttgatcacacctgtaatcctagctacttgggaggctgagatgggaggacccattgagcccaggagtttgaggctgccgtgagctatgattgtagcactatgctacagcctgggttacagaggcaaacgctgtcaaaaaaaaaaaaaaaaaaaaaaaaaaaaaagtccctatttagaggttagaggttagttggtgttttctgattggttaaatttaaatttcattttcctaagctgtgaccattcattctgacatgggtttcagtttgcttaggtcagaacccaaggcactggagccacctcagcctaatggcctcccaattaattattttaatggttcccctcttttggctagcctttcatttgtgagagattgatcaagttttagtgtgacatcttctgttaccatcatggctggttttcctttgtttcagcgggaaactcctaagtgtgacgtcagttttaacctacctcctattatcagtaagagggggcaggagggggagttgattctacacatgacactcccagtacataatcaaagtgatgtgcaccttttatatgctctgtattggtgtgtttcctgttttacataaggcatttttcgtgtttgttatcctttgccagctggtgaaagaaaataccccaaagcacaatttcttaacagcccatgtcaagcgctgtctggtatttaatacttatttgctgctgtgttttcttcattaatttctctccaagttcaatacggagttatgtttcatgagtcttgcacaattgagtgctactcacatgactacaatgctacagccatctcattttctgtcctctgatgtgaaatggactgtgtcctacatgttactaatgggaagaaattccaggaagttgagaagcctcacaacttccagctgtggattcctcactgaatccataacagaaccatactacatttttgtacaatttcactttggtctggttgacgtataagctcttttcaaaacatattggggggactttttttttttttagctatagcaatctgtttctaacgcagtttttatttaaatgtgcagattggcaagggtgatttcagctcctgagagaagttatcttttatatgagataattgatgcactaaacacttgttccctgtgggtttggggtctagtacaagggaaaaaagtcaactaaggatggcagtaactatgatgtgtcctaacaggggtaggttcaaaggctgagctatcacagagaagggggacacaaaggcagcctggaggacttggaaagcgctggcctaggtgactgtgggtagattgtgacagcagcagtttttctggtggaaaaggggatggagggtggggaggcattcctaatggagccaccagcctgtgtgttcaaagtcctggaggcgggaccatagtgtgttcatgcagtgctgagaggatggagtgtcctaaatatagggttcattgtagggacaggatgggcatgaaatgaaagtgggaaaatagggagcacagcggaagggcctcccgtgccatgctagtgagttcgaacattaaaagcgtagggggtttttaattgggagagtgagatagtctgcattcctggtaccagagcacctgtattttgtaaaagctccctccatgggtttccagcgtgtggctatggttaaggatgattacttagctcaaaccacctatgcaggtaactcgattgtagctaatgtgaaaaaaaaaagccatgatcagttttaagaaactaaaagaacttttatttcccctccctccttaaatatcaaactggcctgtattctaagagactaacatcctgcatgattgatcgggctgcaaggcccatattcacatattcagtctgagttacaaagaaacatactcatcaaaagaaaaattagaaaaaattctattaacatcagttaaaaggtcccagattttatgaaagtgtatttttccccttgttctataaggaggcctactgttttgtatttaaatttagctgttgcaagattctgttcttgtataaatcaaataggtgaggtccagaaaatgagtgcttctaatttctcagttcttaatgccctggtttgagtttggtaacttgcgtcatttaccaccacctggtgacagctagaactaaatgcagctttgtgaagggtaaattgaaggtcaaactttaacatttaatgcatcaagaagtgagatcaaaggtgcctaatggatttcttgcataccagctatatggtaacctggattttggagtagctcctgatttgggggttgctctggggacatgtgtttagcaagatcatcttggcccaactgggcctccaagcatctgatccagacagttttccccctgaagtctatgggatggattgtttaggaatggctggatggatttgttgattcattcatttgttatctgagaatataaagatgatcaaagtctttactcttgggaaactcacagcctagggaaggagaaacatcagtaatcatataataatagctaccttttgagtgtttatcatgtgctaggtgctacaagagacaatatttcaaggttctttgaagttagtagtcagaaacaataccagccacacaagtgtgtgacttaaagtttgtaaaaaatgaaccaaaggcttgagagtcagatgttcctaggaggctatcaaacccaggagcatgtgagtctatttattttagaagctgagtgcgtcacttgggaaagggatgggaggttcttcggggcagaccactggggagactaagttgggattcaaggttggcaccccttggggccggcagtgcactgactctgccagccttagcatccttagtgctcttatctgaacaagtcaattcagatcacagaatatactagaaaagaagtttctgtaagaaatgttccaggataaaagcaaatctgcacagatagcattaattcagcacaatagcatacttgtttcttggagcaccattgctgaaaaccatgagccttgttagaagctgccgcaccctcaaatcctactcctgtccagctccttctccccagaaccaagtgtctctccagactagcatcagccctctgctctctcatgagaagtctagagaccttctctctatagcactctctctaggtgatgtattaaccattcactgatttattttttaaactaccatctaggggacagtgaccagtaggatcctctcaatatcttactatgagctgctcattaaggtgttttaaaaccacctctcttgctttccttgcctcacaagccactctgatttcttcagagacagtgaaacgagtgtatttgaaatcactttttacatcatttgattaaatattacccctgactttcttggaagcttttagttccattttgcctttcatttaaagattttaaaagttaactttaacaatcttaatactataaaaaggaatgaaaaagacataccgtgagagtaatttttgggaactatttctacaaaaatggaaggaagtttacacaaaacaaactttaaccctaccacaaccccagaagtattgcatttatccaacttctcttccagcttttactttcatcattgtaaacttttgcttttctatcccttgaggctttttgtaaactttccattttgcagtatatttgtttttagtgtttgtgtagtatactccatgaaattgatatttcataatttattaccctttcctttagtgctagacattaaggttatttagtgctagacattaatagtccatattaatggaaataaccttatttctctctattataaataatgggagcaagaacatctttatatatagagctttttcctatgtttgaattatatccttaggataaattcccaggagtgggattagtggatcaaagggtatgaacagctttatggctcttaatatttattgctaaattgcctgaagggtcatactaattcacaatgccacctgcaacacaggagaggagctgcccctcccagtcctgccaacgctcatttcttcagtcaatagttttgggcaaatttaataggtagtcaagggtaaccattgctgtttttaattggtgatgtctttaactattattaacattggacattttttcttacgggtgtttctgttctattttgtatggtttacttttcatgtcaaaggattacattttttgacaccatgtgaaatttaaaatacttgataatgaaaatgccaaatgcacacagaacagagagagtaattgatggagccctctacgttacccaggttcagcaaatagcaagatttggccatacttgctttatctactccttcctcttttttcccctcttgtgcagtattttaaagcaaatcccagacattctgcatatgtttcctatacacttcaccgtgcatctctgaacatatggactttttcttacataattataacactatcatcacacctaacaaaattaatgataattccttgctattatttaataccaacctgcaataacattttccaaagtgtcttttcttctgatgctttgttccaatcagcatacactgtgtttacatttagttatgtttctaaagtctcctaatctagagcattgctgccccatctctcccgactacttttattcgtacctaagaactgagtcagttgtcttgtaaaaatgttcacattctggattcgactttttgtgtccgtgttagctctagaagcttgattagatcaagtttcaccttttcggaaaggcaagaacacttcatgggtgatgctgtgtgtttcatcgtgtatcacttctggggtgtataatgcctggttattccaccttgggtgatgccaaggctgataatggagtcaagtggtgacaacccaaaacatgattgaatgttttttcattagcttttaccatcatggtttaatctactgatgatggatgcttgaagccattatttcatagaaattgcaaaattgtgattttctaattctgtcattccttggccattgattaactggaattattctgtcaagtaaaactagggctttttagagtctcaaaatgcagtttgaacagagaaggcaagacagatgctttattttttcctccaaactcctttccaagtaaggagttgatgccttttttacatccattggagtccagtgagctgttactgttttattctaaagacatataatagtcatgttctttaatatctttatatttcatgtgttttactcaattacactcattattatttttgatgttcagaatgttccatccttggcccaaggggagacacctcatgtccttgttttcaggcataacaaggtatctcacgttcatctagtttatttttttgtcccctgaaatgagccattccaccaagatgtcctgtgtttttttagtggggaatgctatttagagaccacaatctgcacatgttatgttcttattgtttccaagttttctcagtagatagtgtagagatacatattttacaaaagaaaataaaaattatgaattcatactgatattgtcattttaaattgaacaaaattttgtttacttctttgatttcacacttgtattgctttctcttacagtaaaaatcttggttccaaacatgatgataccacaatatacatcaaacggtttcaaaataacttcagtgttactgctaacaatcttctcagtgaatgagagattactttgcagctctatttatctttaataatccactaagaatattgagtcaaattactgtattctaataacacttggattaatacttctcaccaatttgatatacatcgtttcttcaattcagtttgttctcagattttagggttcactttttttctttttggcttcattttattttttgaatctgtaaaatatgctttcaaagttaaacctatgtaacaaggcttatgtttattacataaacctatgtaataacttatgttatcctgtctccttcacctaagttcttccctttccctattggtagctatttattaataattagggttcattttgtctttgcagtgtttcttttgcaaatacatgtgcattcatgtgtccccacctgttttacatcaaagcgagtatactgtctaccttgccatacacttcatcagtgtttttgagatctgcattttttggaaggttacacagacctccatcataccatgcatggtttaaccagtcgcttattgatggagttctgttttgtgtttcctaaaataacacatatcctttgttcatatcatttcatattttggccagtgtatctttggtatctattcctaaaaatggaattgctgagtcaaagggttaatgcatatgtactttttctagatactgctatattcgcttccataggaatagtgtcattttgcatgagaaggattttaaaatttgttttgttttcagacagggtctcactttgtcacccaggctagggtgcagtggcatcatcatagctgacttccaccttgacctcctgggctcaagcaatcctcccacctcagcctcccaagtagctgggactacagggacacaccaccacacccagctaattttttgattttttgtagaggcagggtctcactatgttgcccaggctggtcttgaactcctaggctcaagcaatcctcctcccttggcctcccaaagtgctgggatcataggagtgaactactgtgctcggcctgagagtgattttttgaaataattttgtgagcacacaaatttaatatacaggatttttggaaagttaatgtgttattaatgatcctgcatactgttcccactattatgcataacacggcctggtacagagtactctggttcctgccttcagggaagctatggtttgtctagggagacatgatgtatgattggaaaacaaagagtagtctaagatagaatatattataaaaaacaaagatggatctttttaggaagcctttcttgcttactccaggccacatgagtcttcagtcctctgaatttcaacacttttaatgagacttctaatgatccttttttcaaaccaacttttgacacttggttgaacaaatatgaatgtattgaataacacagccaaatgtttgaaatgcaggctgccctgcaaattcaagccgaataatcattttttggagagttgtatctacatttcccaaagcatgttctctggaagatcttctggctgttttaaagggttacacagcaaaatcagtgtggaaatgttggattaatcaaagctgaggagctgtgactccagaatcatgtctgctgccccaagctcacctgttcacacaatccgcctgtcttggagcgtctcgcgttaatactgttccacgaaacacagagaatcagtatgcaggctgtttcaatgaaaaccatccagccccactggaaatgaggaaaaatagaaatagaaataaaaataaatgaaaaccaagggcatctattccagttgataaacctgtacttacacaattgtacatttttgattaacaattttccatccctttctttctagattgaatcattaaagaaaaagttgcaacagaaacagctcttaatactgcagcttttagaaaagatatctttcttagaaggagaggtaaggatctctgtttctttaagttggtgtcttccctaccattaaattttatgttgctaagcctaccaccgacacttaattaaaaatatggctatttcccggccttataaaattgattgagggttaagtgccagccttgaaaatgaggttctgacagctgtttttcctttaccatcggactcccctcattccagttgctgctgacttctgctttttggctctagtttttcttattaaagaatcatcctagcaagcctgataagctgttgattagcactgataattccccgcatttgtccagtgctttataatttgtgagatatgttcatatacattccttacattattctctctgcaactttaagaaaggcaagactaagattattatctctgtattaatacatgagaaaacagaggcacagagaagacaggtggttttgctcaaggttgcccagcttaataaatgtcagagccaggctgaaagactcctaaatccagtgctctcctgtcacagcgagtgaagatgtgttagaggggacttaattttacctgaaactttcagatgcttagtattcttgactttctggctttttgaaagtcatttggggattttgtatatgttccagagaagaatattatggggttggaagaactttacaaggagaagtcaaaatctatttgctctaaaggttctttattagagcttggcattgagcctttgccttttgagacttcctgaaaagctggtttgccaagcacctgtccttatctgtgttcctcgttatagtccttccacagtgagagagcccagcagacaatgataaagtaagaagaaagagaagagaaaactttgattaagccctgctgtgtgttgggcactgttagttactttggatatgttctgtgtaacacagaagttaagagtggaatccaacttacccaagtgtgaaccctggatctgcttcttatcagctgggtgatgtgggggaagtttcttatcattataaaggagggatcataactgtgctatgtgtgggtgacagtgaaatcagaatgtatagaaggtgcctggcatgtactaagcactcaataattttaaacgtattattgttgttccctctttattaaaagggacaccctctgagttagatgatattttcccccttttttagatagggaaactgaggttcgggggtattaagaagtctgcccaaggttacagtagagatgggtaagcctggatccagatcctgagctctgaaccaccatgtttgagtgggtggtgagctgagccttcttttactctgtttttgaggggttgccttacagcagtcataaccagaagtccctcatggcccataggggcctggcaccagattcaacgcccaagagtctctgtcttttgaagctgagtaaatgggtattttccccatttccactcctgtcttccctgccacagtcattggctcagtgccagccttgtgaatgaacatttctgtttctaagattcctttctgaaattgcagctccctgtgggaggaagcacaccttccccagtaagagtcagaaaatgagtgccctagtggaagcccatgtggccaaagagaaggcagtcacaggagagaggaaagacagactgacaggagaggcagaaggtcccccaagacagtgccccccacccccacctctggctgtgctgctaaagcaagctctcctactggtagattcttaaatgtccaagggaatattgcacatggggagtaatcttagaaatagctatgttggtttatgctcagtgtattaaactcatgtctcaccttagtttgggttgctccagcccttgaaatgtggagtccagatagtttatctgggaggcgatctcaggaagccccactaggggaatggggaaaatgagacagggaagggaagagagccaatagcggtgccatatcaaggaggttgccctgaggacagctgaggctcactcctgctggggatctctgggagatggtgtggaagtggccctgagctttccttactgaaaggccagaaagctggggcatttatccactaactcccatcagtcattagctgaggcctgctctggggggttgtggcagttctagcctgccctcggcagagccagttagactctggtggtcaaaggaagcccccagatgaagaatcaccagtggcctgttaggaaacaggaatgcccagaggatgtagcggggtgggtggcagtgtcagctatgtctatctaataagcaagactttgaaaaccagtttttttttgagcatatcaataatgattatcaatttgattgattaaattccctgaaactatttaaattccaatacaaatttattatgactaattgcttttggccacttcacacatccaccttaaatagcagacaatatatacaaaaaaagttgcataataacaagatttaataatacatttagacttaaacctattctaaaatactaaatatcatgggttttaatttattttgtcattgtttctgttcttgttttttttttttttaaaccttcctgaggccattgttttacttctttcaatattttcttagggctaacatcattttgacacctttcagacaggtgcagtcatctttgagatccaaaagagaaaggataccttctctaaattgctaagattagaggatgtgggttacataggttcttggttgggtcacaggaccctcagtggcttcttccaaggtgattcaaacacaggactccttatcactgtctttagcactattaaaaacttatgcattctttatcaatatttcatcatacatagctaggccatgtagagatctcctctcctagggaatcagaggtgacattcaaatacttggttttcctctttggctctcagactagctgatcatttacacacactctgccgacgctgttccttgctaattgtggatgatagctaatgctgacacgttgctgcccaactctccacttgattgctctacggcacggatgctaagcagtccttctccaggtcctgaagtcctggggtgacctaacttacatgttctttagttattctttctaacataacagaaaacttttaaatagatatctaattaatacctcctaaaagaaaccacaaaagttttggtagataaatctggtagctccccatcttactaataagtagctacatttgtgaagagtgcaattgcagactccagactcagactacctgagtacaaatctcagctctgccacttagtagtgatgtgatattgagcaagttaattaactgtcctatgccttagttggcttattggtaaataggaactctctctgtgaagtggcatcctctccatagagttgttatgatgattaaatatgttaatacttaagtgattagaaaagtacctggctcatggtaaatgccatatgtgttactgtttctttaattgcctgcgtcccagggactcttttattgtcattgataaatattttagatttatagctatgtcccataatgaatcactctttctcttttgctcatcctcaaagttggagactatcatcaaactcagctgtgtgataatttaacaaagagaatttcacctttaggtgaacatgagcagggattgtacaagccaggtcctactagcaggccatagggcccagcagtcctttgcctgcagcaacctgaaaggttcatcctgggagggtgaggctggacgtgagtcttataggctggcaatatttcagcttcttttagcagttggccccgatatttgcagaattcataggagtttgggattcatatcaagtcttagagtttaagtgtcataagctgatggtcttgtatgatgtcattactcctattatgtattctggctccatgcccaggcagtatttggggatttattgatcatgcctgtgctcctcttagccacagtgctgttggttttaaagaagcaacccttagtttcagattgaagagccttggctcttacacatgtcctcagttagtccagttcctagctgttccccaagaacactttagctgttctgcttcttgagctacgggttcaggactgcatgacatatccagcactgtgctggagctgcttcatactggttaatgaaagcggaagacatgcatcacttctcaggtctccatttggggatgtcatgttggtcgcttgcaattagctatggaggaggtcttgacaccacagaaattgacatatgtcacaatcagagctttttaacctagggattttattgtcaaaaatttactagtgcaccattagtgttatgtaactctgcagttatacctaagggctttgtgtttttaccctgacacctctgcttacaagcagagtaactctgggcaggtaattctacccctctgagcatcagtttcagcatttgtgaaatagggataatccctcccacttgaaagaaactttttatgattaaataatagatacaaaagacttagaattgtgcttggcacagtgcgaaagatggacaaatgttaattctttcttaattactcaaccttttggagacttcggttctgactcacattctgccattatctgtgcatgaccttgggcaaatcatgccaccaacaacctggactcggttagttcatctttaaaaaagggagaaggcttagatcaactctgagattattaccatttttaatgtttgaaaactttgttgaaatgttgaaatcgtattaggatcctagacagttaagggaacaccctctacctgatcctgggctcggagaaaaggacaggccctttcctaggtcatggctgacactctagaacccttcttcttttcttttaaaacagagaatatggattattttagtccctggattcatcatttgtgcttacctgggtttaaactcattagattttgaactccctcctccctctgccccaaatccaaatgacacagcagactcctaaaagcttgctctagcctggccctgtcagactacattttcatcaaccaatttaaaatcttcctgatcccgctgatgagtgagaacatgcggtgttcaggggacataaacatgggaacgataaacactggggattactagatgcgggaaagagggagggggaaaaggtctgaaaaaccacctactaggtactatgcttattacctgggtgatggcctcagtcataccccacacctcagcatcccacaatatacctttgtcaccaacctgcacatgtgccctctgattctaaaataaatgtgaaaaagaaaatcttcctgataacaaaaatatgcccattcttttttctttttctttttttcaaacaattttttttattagctcaacttctggagaagaagaaatattctccatttccaatatagaaaatgttcttaaaataacattgcaagcatttatcttcataagctttctgaaactctgaacagatttcgttacacttttctctgtcggatatactacacttacagctcaattcaaaagtcagaggaaaggagtcaaatgtcttggttttgtccatcctgcatttaatgtgtgttgtgtagcacctgagcctctcagtgtgtctgttatgcattcttgcgactattattaatttttctgtgtaatgttggagcggcagcaccaggcactcggctccccacatgcattttatggaacacacattcagtgtatgtgctacagcccccgagctgcccacacccctgggcctgaggggaatggtgggggaggtgaccgccaaacattcgtgacataatttccaaaaaatgtccagaagtgctgcacattttctcccttcgtgaaaggcacatgtgcctcccaagccattgggttggtattcgttacacatataaacacaagggggtggtgtttgaaagcaggaaaaccatggaatttgcttctcaatcccagaagcaatcttttttgtagcacagtccaggcagcagtctgaggctattctttgtcgttccactgtagtcatattctgcaagactaagaaggagatagtcttgatttattgtatcaaatcggttaatttaatttttaaagacttttcttaaatctgtcccacgctctctaactctcctcttactgcccatgttcaggctctcatcatcttttattttttaccttatcaacttagttatttattaacttacataaataagtttctgttatttattaacttacataagtaagtgtttctgtttaagcatataatccactgagttttgacagtgtttatacccatgaaataaccactacaatcaagatagagagaatttctatcaccccaccaaagattctgtttcagtttgcaacccagctttccattcatccctaggcaattcttgatcttttttttctgtagatggtgagtcactttttatcacttttggtcactatggatttccatttagtgggaatccactgtatgatttgcatttctagaaatggaatcatatagcatgccctcttctctgtccagcttctttcactcagcataatgatttgaggcgcatctaagttgtatgcattcccttttgttgcagagtggtattccattgtatgaatatatcgcagtttattcattcagctgacaaaatacatttgagttgtttccagctctgggctattgtgaataaagctgcagtgagcattagagtacaactcattatgtgaagatagttttagttcctcttgggtaaattcctggtagtggaatagctgggtcgtaaaaggaggtataagtttaactttttaagagaccgtcagtttttcaaaggggttgtagtattttaattttccagcagtttgagtgtaccagtgtctccatatcctaacccagacctagtattgccaaccttttaaatttagccattcagtgttatagcttttagaatttgtctagtaggttttctggctttgaaagctccaaaataaaaataaaaacaaaagaaaataaattgagccatgctaggggatatagagtgctgtctcatgtggttttaatgtgcatttccttgtcaactggtgatgctgagcatcttttcttcttttcgagaatcttttcatatgctttttgccatttataagtttcatcttttgaagtgtctgttccaatctttagtccgttgttttattgagcttttagttttcttactattgagttggaagagttctttatatattctggattcgagtcctttgtcagatgtatgtgctatgaacattttctcccatcctgtgacttacttttttgttttcttaatgatgtctgttgaagatatatatatatatatatatatttttttttttttgcaatggggtcttgcacagatacccaagctggagtacagtggtgcaatcttggctcaatgcagccttgacatcctgggcttaagttatctcctacctctcagcctcctgagtagctggcactgcaggtgcatgccaccacgctcggctaatttttgtatttttagtagagatggtttcaccacgttgcccgggctggtctcgaactcctgagctcaagtgatcagcccatgtcgggttcccaaagtactgggattataggcatgagccaccatgccaggccctgttgaagagattttttatttttggttttcaattaaccatttatttcttttatgatttttgtcttttgtgtcctgagaaatatttgcctactacaaggtcacaaatatgttctcctgtgatttcccctaagaattttatggtttttacttgtttatttagttgatccattttaagttgatttttgggttttgtgtgaagcaaaggtatcaatactctttttttctacacagatgcccagttgtttacttttaatgtctctttaatttctgatattatttgtaccctctttctctccctatcttatccactctgtgtctctgtctctctttctctttctcttctttaaccagatagtgggttatcaatttttgttgattttaaaaaataattaaaatagcttttggctttggtgattttctccattgcttgtctgctttctattttattgacttttgccctgatgttcattacttccttccttctaattatttcgggattactttgctcttctttttctagcttcttgaggtagaacttaggtcattgattttagacctttcttcttttttaatataaacctttaaagctataaatgtccttctaatctctgcttcacctgcatctcacaagctttgatatactttacttttattatcttccagttcaaaatatttcctaatttcccttgagatttttctttgatttatggattatttagaggcaggttatttaatttccaaatagttgaaatttttgttgatatttttatttctaatttaatacttttatagtcagagaacacagcttgtatggttttaacttttaatttattgggacttattttatggctcagcatatagtttcaattaaatttttgtgaaaaaatatatattttgctgttgtgtatatcctacaaataccagttgggtttaggtggttgataatattgtttagataactgacatttttcttggattttgtgtaattgtcctatcaattgccgagagaaaggtgttataatcccttaccatggttttagactgtctctttctttgtttttactttgtgtattttgaaactctgttactaggtatatacacatttttgttatgtcttgatgatgaattgatctttacaatatgaaatgttggtccctacctttgtcaatactctttgtcttgatatctattttaactgatatgaatgtagccatttttaccctgttatatttactgtttacgtgctatatattattccagccacttactttcaactgatttatatctctgtatttaaagtacatctcttatagaaaatagttgggacttgcttttttatacatagttatagtctctgccatttaattggagtatgtagtttactaatatttaattatatttatatgattggatttagagctaccatttcattatttgttttctgtttgttccttctggtttgttttgcttattttgcttgcttgtttgttttgttctcctttttgccttttggattatttcaattttttaaaaataccattttaagttatccattggcatttttgctgtgtctcttttctctaatatgttggtggttactctaggtattgtagtatacatcattagctgttcactgtgcacctagagataatattgtaccatttcttttaaaatgtagaagtcttgccatgatatacgttcatttaccgctgtgcctgtggttataattttatatgtattgtatctatatacattataaaaccatgatacatgattatcatttttgctttaacaatcatatgtactttaaagaaattaagagaaactagattctttcatatatactctatttctgaaggtctgagtttctctctgatgtcatctcgcctcagcctgaagaaattttatttagaattttgtgtagtgcaggccaggtggtaaaacattctcttagtttttcttatctgaaagtaaggtttttatttcgccttcattattgaaagatatagagctctaagttgccggtttatttctcttggtactcattgtttctgggttccatggtttttaatgaaatatctgtagtgattcaaatgattatgctcctgtatataacaggttgctttcaagatttttcttcatttgtggttttcagaagtttgactgtaatgtgtttctctttgaatttatcctgtttggggtttactgagcttcttgaatttgtaaatttatgtctttaactaaatttggggagttttcagctattatgttttacagtaattttctgctttagttttcctctcctctcttcctttgactaaaaaacccgtatgttaggcttttcaaattgcttcacagttccacagtgctccatttattgttttcagtcttttgtttatctactttcaattggataatttatattaatgtattgtaaaatttactgactttttcctttaccatcttcagtcttaagtccatctagtgacttttaaaaaaaaattcaggtattgtactttcctgttctaaaattttcatttagttcttttttgtattttctattttttttactacttcattaattgtaagcatatttttctttgtctgactgatcattgttatgatggctgcattaaagtctttgtctgaaaattccaacatcatagttacatcaggattggtgtctgttgattctcttttcccttaggagtgggtactattttcccgactctttatatgtcacataattttggattataagctggacattgtgagtgctttgttgggttcttgttttaaaaggcaatgaatttagccagacccaactacatcctgcctgtctgtgatgctgatggcagatctcagttcagttctttaaacattagctgcaaacttctttcagttttctccagacatgcatggttcagtggtctaccagagacttgaactgagtctgtatacaagaatttagtgttttcccccaactctgactctcctcttttgccttctcccctactgttagtagccctggcatccttctccgggtttcttcccccagaaagatgatctttctgttaatattttactttatctctactgccaccaccatgactgtgctgctctcagggcaaatctgccagcaaaaagaaaaataataaaacacggagaatatagagaactgcttgccacatgcttcaagtttcacctcatctccaaaacttgcctgtctttgttcacttctctagagatctcattagttgtttctaatctgttattcagaatgtacagctgtgagttgcagcaggatcagtgtgttgagtgcatactcctctcactgcaagtgcagcccccactctttagctgaataattgcagtggtcttcctgctgtctttagtcttattttcctccaatccagctttcacttgggagccaggtgattaaaataaattctggtgctgaccttgctattgtaagattgatttctaacttcttgtagtggcatacatagcctttcattaataacttctacacacctgtgtaatgcaataaggtgccttttctcaacccagtgtgtttccacagttctggaatactcatcacctttgatttttcttactctctttcccttgcctaactccagaaactccaccgctgtccccattttgagtcagatgtcccctctgagttccctcttaatattctgtggatccccctataatgttacttagcacatcgttctattatttgctgctcagttatctgtattcccccaagaccgagctcctcaagggttgcaaatcatgccatatttctttaacttctaactcttccctcacctaatttcactgcctgatatatagtagatatacaataatttttctactgattgcattatattctcatgagtatacattttttatttctgtttctatgggtgtctgttgtgcacacacagagttcccatgaaatagaacaaaggatttggggtcatttgtcctccattcactgtgtatcagttgcggcatatttgctaaccttgtcttttaggccccctacctataggtattagacccagcatgctgtgaaatccttatgattaaagtctttacactaagaagggataaggcgatggtattactggagtatccagcaaaggcaggcgtcttctgcctttctctttttttataaattggagagttcagacattgctggggaagctcactgtctctttctctctctctctctgtctgcacgtgtgcgcatgcgtgcatgcgtgtgtgtgtgtgtgtgtgtgtgtgtgtgtgtgtgtgtgtgtgtgtgtgtgtgtgaatgctgatgactctccgggaataagccagcactggggatgaggtgatagattcagaacccatcgatctgtcatagcatgtcatctactaaggaatctggaaagcattctcttcctttacaccatttcttatttatcagaaaggattcattgacttttacattgtacggaacatggattttcacaagaactgatacgttgctccttggtatcaacctttcagagcgggagctactgaatgtttaacccacatcctttctttcaaaacaaatgagcttctgtctccatagaacttttaaactttcttgtgttacctagtgtcttagaatagtgcctcagcttcagctccaacttaaagaagaaaagaacaaatggtttcatttctagttatgcaaataaactgctcattgtaaaatcatttataaatttatttatttagcaaatatttatcttgtatctgctgcatgccatgctttgagcatacaaccaggaagatagatatgatcactgcttcatgaacatttagtctagcgttactgaaaaatatatagaagcactttttaaaaagcatcccagaatctcaatacgcagacataaccactgttcacttctttctgaatattttttttttggcatttttgcccttcggatttcaggcaccagcacttcgtctattttcatttcagtatcttcaacttctttgtctattttcattttggtatctcttgcttctttgtccttcatttcccccatgaggcaaatctccaattgctgagcatctaatctttaacttatgtaatgtttggctctggcccgaaagaaaaaaaacttttcagaatgtgaattttaatcccaaggagcttgttctactttatatgtgtgagattctgaattttccacacctacgaaagactaattaagttatagaggtatttcccactgttaaattaaattaacagacttgctcattttatagtttaatgaggaggtgttaaaagttgggctgtaccttatttataatggcaaaaacgtgataaatatctaaatgcccatcaataagagactagttaaataaataatgtatccatagaatggaatactattaatgagttaaaatagtttgttgacataaaaagaaaactaatatagatggaaagatagctacaacaaattagtggctgaaaaagcagattataacatagattacaatattttgttttcatttatgtaaaattggatgcacatgtctgtacatgcatagcaagccatttgtatgcattcagtcaatctatttcttcaacaactattgtgtaagtgatgctctgtaaatacattgtgatagttgcccatgtcatggggcaaaatcagataatacatataaattgtatcatgcatatttgagggggaacatatttgacttactgaaagtacctttttttctcatctccagaataatgaactacaaagcaggttggactatttaacagaaacccaggccaagactgaagtggaaaccagagagataggagtgggctgtgatcttctacccaggtatttaggaatttcctgatttttttttttattcaaattcctctttggctgaagaaaatactttactaggctgttcttagcagaattgcattcttcctatcacaaatatttctgcaaagccgagtggtggctgctgagaggcttgactggtttctgtaggaacaggggcattgtgcagggtggaggggtcagcaaaggagagacctggggaagccatttagagagagatgggccctgtcagtgagtgaatgcatttgttccttccttccttccttcattcattcaactaatgctcttagtaccttccctgtgccagacagttatgacacagagaggagtgagatttggttcctgccccagagtacagtctggagggagagacaggtatgtaggtagacatatataacggtgtgagaggggcatccgaggtgctttagtgatatacaagagggaggatctaaaccttgaacaaaagtcatctgttcctcagtactgtaacagggtattgtcaagcactggatccagttcataaatacctgatctgcttgagtcatcggcagatatgtgataactataacctggtttgttcagttacattcctgagctagaggactgacctgttcattgttaagctgcttccatgcttgcgtctcttcctggtgacattagagcctgtaacacagtaacctgcctctgataactaactcaccattcccgggtgctcacaactgtgcctggcctcaagaggacataaaacaagtttacagcaaagatgctaatgacatgtgacttgtgatttaggtaatcaaagtcacaaaatgcctggtatcgtgtgtgcaggagggtggattcttgtgtgaacaggggcacttgtgtgtgctttgctggacatagtagtctagaaaaatgtcgaatcctggaatcttgagtggttacagctggtgggaagtagtgacgagccgatcaccaagctggggtgtggaatacctggttcttgtcctaccagccagcagcaggatgccttcagacaggttcttcactggggcctcggtttctcaacttctaaagtcagtgatttgactaggtaactgctcaggcctctaccagctctaacattgtacagtaaggcctcctttccttactttattaatttttatttattactggtattgtcatttttgttaattaaaatgaatcacttgccattctcaaagaatttaccaaaagcggcattaggttctttctttgacagtgtcctcaattacattgcttgccttctagtaaaaaggcattttttatcagtccaatataattaatagaaaatgttgaatatatatatatgtatatatatgtgtatatatatatatgtatatatatatatatatatatacatatatatacatatatatagactccggatctcatcatattcagatatattttcatatatgaaaatataaccaaaaagaacgatcaattgtgtacagagacctttttgaaatttaaataatttggccgtttcccccctttttgtatttttcaaaagccaagtggcctagtccactctaattgcccacataataaatcttgtttggctaagacgggtacaaaactatgtctgaaaccaataaattgtttgttttctaattcccgcattttggcttaaaacaagcttttcaatttgtatgcccaagtatagcctgaagcaaacttttatggctaagttatgaaaccacaaagcggttttcataatggaagtgctgacagacccttaacttatggccatggtgaacttggaagccacttcagtatctaaaagcagcttttccataaatgtaacatttggtttccccccggatccatcttagcagtttaactacctaggtcaatcagcagaggaaatgaaaactacatatccgtgtttccgaaaaggcagaataatatttcattcgtttcctcgcaaatatttattaagtgcctactatgtgaaaggcgccagggaagtctgggtggggaggagcccagaatctttcggtaactcagggcagtggccttccacctgcgcttcttggaactgccttactctgagctggggctcctggagaggcttcgggatgcccggggggatgaggagggttagtgagcggctggaccgtgggacccttcttcctccccaaaacaactgagaaagtcagcttttagtttgttttgtctgttggattccaagtaagattctgtttgaataaatagctctatgggcaaaaacaaattggaactcccggtctagttaatccccatgttttatggatgccagaactggggctcagagagatcaagtgattcactggaagccacatagccagaattagaaccaggccttcttgagtcttggtgcagtacatgtgtagtttgaaaatatgtaataaatagagagctactaaatggtggtgtgtatgttctaacaaaattcctggttcatacttggacttcaaatttgcatctaactaataaaagattccatggtattgtccagaatgttttttagatttttgtttctagaatgttttagaccaatacaagcattgaattaagcctgagttatgcagaagcgttttgttctttgtccctattcttctcctacaaggaattcaccagtgtggaacagtcagggaggctcaggctgtccagttccctgcccagccagctgctagctgagctcagccttgggcaagttacttcatctctctaaagcttcaactctttcatctttaaactaagaatgaagaggataatatcaaacctcattgggttgctttgaagattaaataaaaatgtgtacataaagcatttagagactgggcatggtgggtcacacctgtattgccagcactttgggaggccaaggcgggaggatcccttgaagctaggagttcaagaccagcctaagccacatagcaggaccttatctctaccaaaaaaaaaaaaaaaaaaaaagaaaagaaataaaaaataggccaggcatggtggctcatacctgtaatcctagcactttgggaggccaaggcagtggattgcctgagctccagagttcaagatcagcctgggcaacttgatgaaaccctgtctctactaaaatacaaaaaattagccgggtgtggtggtgtgcacctgtaatcccagctactcaggaggctgagacaggagaatagcttgaacccgggaggcagaggttgcagtgagccaagatcatgcccctgcactccagcctgggcctgggcaacagaatgagaccccgtctcaaataaataaaaataaaaatgaaagcattttagcatggtaactggaccagagttaagcacttaataactaatagctattactattaatattaactaaacccaaactctgattttctatgtagaacactatataaaatacaaaaaaatctgagtatgctaagatgatttcattaactttttattggtggtaatcattgattttatgaaatggattgatagcctgatcaagtatatagtacttcagtatgcattgggctcttcagttaaactctctagacaccccgtctagacactgtgtaaaactctgggaggcccagtgattgataaggtctctgtcagctaagacctgagagtggcccctgcgtgctgtaggcatggggcacttgtcttattgtagaatagcatggcctctcctactcactcatctgtacaactgcaagtgttacatgctgtgctactgctaatagcatttttagagctgctctacttttttttttgtcttgtgtgaaaaaaaaattgcatttagttgccgggtgtggtgtctcacacctgtaatcccagtactttgggaggccgaggcgggcggatcacctgaggttgggagtttgagaccagcctgaccaacatggagaaaccccgtctctactaaaaataagaaattagccaggtgtggtgacacatgcctgtaatcccagctactcaggaagctgaggcaggagaatcacttgaacccaagaggtggaggttgtgttgagctgagatcgcaccattgtactccatcctgggcaacaagagtgaaactccgtctcaaaaaaaaatgcatttagttgatgctcaataaacatttgttgggtgaataagtgaaagatacataccaaatgaagaacataggcaggtgatcagtattatcacatgatttatttatttaataaaggccttggatgaagtcattcctgcttatgtttcacctctttgtgtgtgtgtgtgtgtgtgtgtgtgtgtgtgtgtttctctctctctctctctctgtctcctcactagaatatgagctccatgagggcagggattttcatctctttcactaattgcattctccctgggacctccttagagcaatgcttggcacatactaggcactcaatatttgttgaatggagccatctccctgtagcatttgacaatccttcctaagaagaaaggaaggattcctcagcctatttcctacccttgcaggacttttctctcctggttctccacctatctccctggtctgtccttctccagcttctctgatggcttcttttcctcctccaagaccctcccatggtagtccacatggctctatcttggttccggtactttctgcaaagattacatcaagtctcacagcttcacctctcccctctgtggctgagccacagaagtgtgaacctttctcttgaatacaagtccttgttccccacagccttctgggcacactcccagctggtgtctgcttggtcttcatacttgccgtttcatggccgagtgcgccatctctttcttcaaagtctctcctcttaggagtgagtaagaatactggcttggaagttagacctgggtttgggtcctgagtccgcctcctgctttatctgcagctttggcaaattcctaccctccttgattctcatcttgaaaaggatgattttggtggcaatccctttggaagcttgttgagaggattaagggaagtaacaggcatagaatgtccagtggaagtgccccgccttttcatatttctgtggctgcagccactgctttcccagctacctaaactcagtatattgcagtcacttctgagtcagagaattattttgctccttgactcactcactcatactgtgctgttcttttccttcatgacttgactccttctttcccattcctcttgctgccagcctgcctcagactgtctaatctactcagtaccatctctctgcctcactttctcctcctcaaattcttcccctccttcatctaatctttgttttccataaatttctagtgaccaaggatctcttcataaagagagagggaaagggaaggggtgagaggggactcactgtgggttcaggagttcacacacacacacacacacacacacacacacaaatgtatgtgtgtatttaaagactcaggagtttagtttgaaaactttgatatatgttaattaaagccattgagaacaagtgcaggtcatctagccttcatttacaaagaaaaatgaaaaaacaaaaacgaaaggaaaagtgacttttctttcttctgccctgtagtgaaacttggtttccagcaaaccagcaaacttggttttcatcaattatgtcttaataggtgcaatatgatgaaaaatattccccatggtcataagtgctcagcacgtagtaagtgctttaaaatgcttatattttcgtatttcttttgcaaagaccagaacacaaagtagctttttgtcaaagctttatttgctgattctgctattgttttccccaggggaactgcccctttattgattaataaaaggttaacaatagcctaaatgtgttaaggcaaatggttgggtttcagttttgtggttgaggttatttgtgttcttgaaatcctgttgtttcctagtgatcaacaaaataaaataccccacttcttttttaaaagatcgggatatgagagcctgtttttgaacctagaaggttcacctttataaatatttctgcattttatgggctttcaggatattgtcattggagactgtttctgttatgcagaattttcacaggagttggcacaaatagccatctggcttctgcccctggcattccactaaactgcctggtcaggtcagtggggcctcctggatcaccaggtcccatggattgctctctgtggcaggtgacactgggaccacttacttcttgaaactcctccaacctttggtttcctttgtaattcatatgtggggtaatagctctgtggctggcttctgtgagctgctggattcatggagatgacggagatgtggctttcacccttaaagaaattatacctagcagtggacacaaatgtgtagaccaacaagtgcaataagatgctatagaggcttggcgtggtggctcacgcctgtaatcccagcactttgggaggccgagttgggcggatcatttgaggccaggggttcaagaccagactggcccacccagtgaaactccgtctctactaaaaatacaaaaattaaccaggtggtcatggcacgcgcctgtaatcccagctacttgggaggctgaggcaggagaattgcttgagcctgggaggcagaggttgcattgagctgagatcgtgccactgcactccagcctgggcaagagagagagatttggtctcaaaaaaaaaaagctatggaggtgtcagaagcctgtataatagtgatgttcaaggtgtatatggggattgggtggagaatatggagaatctcctgggggagacatgcaaagtttaaaatacaccccctgccatgctttttaatacatcctctatcacctggtgaatgactggatgtgggaagttaggggaaagggattcgactcttaggcttcatatacacattttgtcatcgtgttggttgggataaggaatgtagctatttgaaagaacccacagatcttggtggcttagcatggtaaagattaatttcccatgtcagtttaaggccgtttggtataggtttcactccacacagtctttcaggaacccaggaattcctccatctagcaaccctgcctgagctttggagtcctcctggattctccacttgtatgctctacataaaagggaagagagagagagagcgtgggggattatgtagatttttatgggttaaacctggaagtagtagaagtcatttctgcctgtttagtcacatggcccacctaatggcaagagaagctgggaaatgtagttgagttgtgtgtccaggagaaaaaagaaatgggatgtcttagtcacctaatcctgttaactataactctcaaatgtctccctaaaatctccccgccacttcccatcaagtgcttccgtcagaattcaagttgtcatgatctctctttcacctcctgaagagcaagaattttctaactgacctgccttcagaataatccttccctagtcaaccctcgatagtaccagaggaatcttgctagaataaaaatatgagcagatcatggccctccttaaaaacctgctgtagttccctgtccccttctgaactccttagccagggacatgggacccttctccaccaggcctcatcttctgccactctccattgtgaactctttgttccagtcgttccaaaggagcacatggtttgcagttccacatccacaaactgtgtgctcacccatctctgccttacacatactgccccttcttcctggagttcccatccccgctttgcccgcttgatgagtgctaggcatccttcaagattcaccttctctgtgtgaatttctagatgtgaatttcctggtggtgctaaattgttctgccctcaattttcccatcatgtgttcatgctcattttgttcaggtcatggcgggaagggaggcttgagagttaaatgaagggactgttgtggatgtttgggcaactttaagggaaataaacaagggacagtggcaggctgtggaactagcaacagtggaagctgttaccacccttgcctgaggaggcaggggagaaagctggggaagataacaagttggggagctgtagctatgggccctggtagagggatgccgccaactaccaagctgcagcctggctgggaaaggaaaaatgtcccgacctctttgtcctctcattccctgatcccctgctaccaccttgcagtaggccaaaaggaactgaatttgaagggcaaatggatgctgacttttccgggccacagagtagggtggagaaggggcagagtagggctgaatggcaaaagaagaatgcccagcacagctgttatgtctctgttatagttcctaacacagtacatgaaaattttttatgtacatatctttcccaccaggtgacaagtcccttgaatgcatgtttcatatttttctgaaccatggatgcctagtacaacctttacaggttgttaaaaataacttttttatttttaacctgtcgtagtctgttctggctgccataacaaagtaccataaactagttagcttataaacaacagaaatttttttctcacagttctgaaggctgggatgtctaagaccaaggtgccagcagatccagtgtttggcaaggacttgctttctggttcatgtatagtgtcttcttgctatgtcctcacatagcagaagggatgatgatgaatatttctggggcctctctttttttttttgagatggaatttagctcttgttgcccaggctggagtgcagtggcatgaacttggcttactgcaacctctgcctcccgggttcaagcagttcttctgcctcagcctcctgagtagctgggattacaggcatgtgccatcatgcccagctaattttgtatttttagtagagacagagtttctccatgttggtcaggctggtcacgaactcccgacttcaggtgatccccctgcctcggccttccaaagtgctgggattacaggcgtgagccaccacgctgggcctggggcctctctcataaggccactaatcccattcatgagggctccaccctcatgacctaatcacctcccaaagtccccacctcctaatacatcaccttaggggttaggatttcaaaatatgaatttgggaaaacgtaaagtccattgcagggcctgtttgtaatatttaagtgaaatattaagctgcattattgtctttttatttttaaacacttaaacaccattttctagagttgtcttaccatgtgaagcatatggggggttttgttttgtttcattttcctgacctgcattttctcatttctcagccaaacaggcaggactcgtgaaattgtgatgccttctaggaactacaccccatacacaagagtcctggagttaaccatgaagaaaactctgacttaggcactcagaggcatacactttttacagatggacaaaagctctggaaccctgtggcttcaaatcctttgggaagggtgactgttgtttcccctacacacagtgtaagccggaatgggaatcgctgaggctctgatccacttctaagacaggaaggaaagtgaaggcagagtgagcaggtaagagagggatatacaaggtcacatttcagacacccactcggcataccctgccgtactgcatcatcatttgttttctttgtagacactgaaatcctatcaggaggattccttcacaatgtattttatttgctagactttggttgggagggaaaaggacattaatttgaagtttcatgttattcatgccaggattgtttgatagagcatgaaggttttgtttacccataaaagtattagaggcagcgtttctctgatacagagaggcctgtccacaagaagcatgggcacccagccaaacttgaacctggaagggagggttcccggcctgcaggtgctctttcctcttggtcccaagcatctgtgcagggtcgtgggagccacactgagagacttgtgtgggccagacaagcttcattctgatgcgctagtcccttggtttaatttgtgccttatgctttcattggaccagctgaaatcactgtatttattcaactagtgatttttttttctttctcactttaacttaaagagaattttatatgtcttggaaatttaataatttagtgttctcagtatcaattggtgtttttgttaaacgaatgaatcatctgttcatgcatgctctactttgatattataacctatgtcacatgtgtttaataaataccatatattttgttctactaatgttgtctctctgtttcatccatgaccatgtagaaggggcagagagcagatcaggctctggaatgagtgtcaaagtcaaatcacatgatcttccagccagtacaattcatacaagcatctgtaaaccataagattgactgtgtgtgtcaggggagggtggggggcctatctgtctttttaattgctgaactttagttaatacaccatgtggaaaaagcaagataccttaatgatcacaaagtacaaaaatagattttacttttaaacctttcctcaaacctcccaccccttactgtctccacttccaaaaaaccaaagaaataaaaaagtaagaaagcaaagcaactcagttagataaatcactgtgagtcagaatcatgctaagaggaaaatgtgcatttgggagccacatttgtatttaaacactgtccgtgggaccttgggcgagtcgtcaaggctctctgaatattagtttcatcctttaaaaacctcggattatcacacctacttgataggctgacgtgagtgccacatgaggtcattcccacatagggagtgggcactgctaggcacacaggcagtgattgctgtcattctggaggttttagagcactgctgattgctggttgagtctcaccactggaggtattctagcagcaaaaaaccgtgttctgtggcagccaccaagaaggagcacttagagaaaaagctgtccttaggaccaggagatagggaagctggactcagagagaggcagagggttctgggagcccatccccctgaagaaactggtctggaagcagtttctaagtgaaatgcaatgacttaaaaaatgtcaattttaatgagaccaaggtagaaatgaaaactactctgccaatacttccacattcacttctttctctctctcttaaaacaagcaaggaaaagaaaaacttagtaattttaaatttaaaggataccagggaccattctgcagctcgggcctttgtattttaaaatatatcttcaacatatggaaaattctaaacatgatttgaactactcaagaagactattaaagagagttcctaaattgtacagactgaaaccgaaagaagctgagagataatccttccagatcctttgtcaacattgactctagtgccccccaaccctccatctaaaggactgacattcatcaacctcttcatgagcaggggtattacataaaattgggagaatgaactctaacatttcatagtaaatttatctcactgaaatggaaagcagcagtgtatgtaaagggtttttaaaaaataaaacaacatcctataatcttccaattaatatcttcattccagaccttccagaattttaaaacacacccgctccattttgtttttaaaataaatataaccctatactgagaagtggaatcatgtgatttttaagaacgtgggaacactcgagtcagctatctgagcttagtcactagtgcgcatgtgggtaagtcacaaccctgtctgagggcctgtaaaattggaactgtgagagttctttcctaatggggttggtgtgaagagtaaatgagttaatgcctgcatggttcttagaatagtgcttggcacatgataagcacttaatatatgctacctattaacattacatacttttgtagccactttttgcttactttatatatatataaatatatatatacacacactttatatagtttgctttatatatatactttatatatagtaagtttgcttactttatatatatacatataatatatatttttgcttattttatatgtatatatactttatatatgcatataatatatatgtatacaatatacataatatatattatacacatatatgtatacaatatacacatatattatacacatatatgtatacaatatacacatatatattatataatatatgtgtacaatatacacatatatattatatataatatatgtgtacaatatacacatatatattatatataatatatgtgtacaatatacacatatatattatatataatatgtgtgtacaatatacacatatatataatatgtgtgtacaatatacacatatatataatatgtgtgtacaatatacacatatatatgtgtgtacaatatacacatatatatgtgtgtacaatatacacatatatatgtgtgtacaatatacacatatatatgtgtgtacaatatacacatatatataatatgtgtgtacaatatacacatatatataatatgtgtgtacaatatacacatatataatatgtgtgtacaatatacacatatatataatatgtgtgtacaatatacacatatatataatatgtgtgtacaatatacacatatatataatatgtgtgtacaatatacacatatataatatgtgtgtacaatatacacatatataatatgtgtgtacaatatacacatatatataatatgtgtgtacaatatacacatatataatatgtgtgtacaatatacacatatataatatgtgtgtacaatatacacatatataatatgtgtgtacaatatacacatatataatatgtgtgtacaatatacacatatataatgtgtgtacaatatacacatatataaatgtgtgtacaatatacacatatataaatgtgtgtacaatatacacatatataatatgtgtgtacaatatacacatatatatgtgtgtacaatatacacatatatatgtgtgtacaatatacacatatatatgtgtgtacaatatacacatatatatgtgtgtacaatatacacatatatatgtgtgtacaatatacacatatatatgtgtgtacaatatacacatatatatgtgtgtacaatatacacatatattatgtgtgtacaatatacacatatattatgtgtgtacaatatacacatatataatatgtgtgtacaatatacacatatatataatatgtgtgtacaatatacacatatatataatatgtgtgtacaatatacacatataatataaaatatatgtgtgtacaatatacacatatatattatataaaatatatatgtgtacaatgtacacctatatactctatatgtgtacaatgtacacctatatactctatatgtgtacaatgtacacctatatactctatatgtgtacaatgtacacctatatatactctatatgtgtacaatgtgcacatatatactctatatgtgtacaatgtgcacatatatactctatatgtgtacaatgtgcacatatatactctatatgtgtacaatgtgcacatatatactctatagagtatatatatatactctatgtatattctatagaatatatatgtgtacaatgtacatatatattctatagaatatatgtgtagaatatacacatacattctatagaatatatgtgttcaatgtacacctacagaatatatgtgttcaatgtacacctacagaatatatgtgttcaatgtacacatacagaatatatgtgttcaatgtacacatacagaatatatgtgtacaatgtacacatacagaatatatgtgtacaatgtacacatacagaatatatgtgtacaatgtacacatatataatatatatgtgcacaatatacacatatataatatatgtgtacaatatacacatatatatgtataatatacacatatattatatataatatgtgtatattatacatatatgtgtatagtatacacatatatattatataatatgtgtatagtatacacatatatgtataatatacacatatatatgtataatatacacatatatatgtataatatacacatatgtattatatataatatgtgtatattatatacatgtatgttatatataatatgtgtatataattgtatataatggatataatatatactatatgtatataatataccaatagtgtatataatatatacgtatatatattatatatagtatataatatatacgtatatatattatatgcgtatatattatatacacctgtgtaatatatgcatatgttatatacgcatatgtaatatatgcatatattatatacgcgtatgtaatatatacatatatatacgtgtatataatatatcatattatatattgtatacgtacataatatatcatatataatatacgtatatatcatatataatatacatatatatatcatacattatataatatacgtatataatatatcatatattatataatataagtatatcgtatatcatatatcatatattatatatgtatataatatatcatacatgtatatattatatacgtatattatatatcatacatgtatatattatatacgtatatatcatatataatatatgatatatacgtatataatatatacatgtatgatatatgatatacgtatatcatatattatatattatatacgtatatcatatataatatatactatatcatatatatgatatagtatatattatataatatattatatataatatattcacatgcatatatatgtgtatatatataaagtatatatacatataaagtaagcaaaaagtatacatatgtattatatatagaaatatatacatatacataaagtaagcaaaaagtgtatatatactatatatataatctacaccattgcttcttataggtaattggattccattttttgatgtcccataatttatttgacccatcccttagtgttggaatcttggatgttgtcttcacttttcttcagcagtcctctgatgaaccatcttgtccacacgtttttgcacacttgactgattattttctcaggatcagttcctagaggaattgtctggtcaaaaggtgtgcacacttttggtgcctatggtccaatacggcctatggaaatttgaattcattgaaattctcactaacaggctgagaatgtgacttcctgactcttttgccaacatgaggaatgagaaacagagtgtacaacatggctttctttaggcagacctgccccccaaacaggtggtgaacaaagttccttcagcatattgcctgtggatatcagaactcagggacatgcaggtgtgagctgcgggcctggaggtgtccctagggcccagagagtgcctgggcagccgacgggaaactggatggactcagaaggagcaagtgtccctcaggatccaggaatcaaagaaggcctgccgcttagtgagccagcatcaagagcctgtcactcaggccacatgcctaagatgcggtttgactctgagtggggcatgccccctatttcagggatagcctgggagagaggatcaacatttgggaagtgcttggagggtgcaccaaccaaggctgacccctgagctggtccatgtgtccactgtgagcacccactttcttcccagtgaatgccatctgcctactccaggaactctagggtggtcaccagggcaaggagtgggggtgataggaatgggtcctggctcaagtcccactgggccatggtgctcttcttgacggccagactgagagggccagttcagttcacccagcacatgccaggtgcttggaagacaaagaaatgcacctcgagacccttgctgtctccaaaatcttttccagcaagtccaggccctcctgatctttcccatctctgaatcccaggggaacttattttcagccccttctttattcttacatctcatgaccaatctttgtgtacatttattatctctccagtgacataaactcctcaggggcagtgtcccataaggggcacactagtcatttggagggaagccattgtaaaccttgataagcatgaagaaatctacaaatgaggagtattccagaaaaagcctcggctttggggaagtaaataataccaggagttactgagctggacacagcacacatacactgagtctttacaacagtcctgcctggaagatgttatcaccaccatttcatggataaggaaattgaaactcaaaaagatgtgaaaattgtctgaaaccactcagacctgtctgatttcagaacacaggtgggaggcctggagtcagtcccaggtctgccattaaatcacaatacctccttggtcaggtcactacagcactctgcagctccgtgccccaggatgcagctttttcgatgaagtaaatggaattgcatcccccacccaggcttgctgcacagatcatggcatagcattgacaaatttcctagcagttcatcagagatatgccaataattgatacctgctactattactagtaattaccgggaagccagtattgcaccaagaatatttgcaaacccaaggatttcttcttattggacacagagattgaatgaatgctagcgaatggaattgtgcagaagacaaacaggagtgagggaaatgctactggataagcaggaggttaaataaactgtatctccttttgtttagatgtgaatttaagaataatctattttactttgtcagggaaggaaaggcctaaaagggagactaaagatgagttgctaaaaaagagagaacagaagcaaagagaccagaaggtgagtgctgctaaagcttggggtaattcgttaggcaggattagataactaatacatggtgtgaaaaatatcgttgcattttgtttttgcatgcaaatatctaattgttttagcactatttgttgaaaagactacccattttccactgaattgcccttgtaccattgttgaaaataaattggccatatatgcataaatctatttctatactctctatactgttatattgggatctagttgcttatcttgacactaatactatgctgtcttgtttgctgtagctttatcatcggccatgaagtcaggtagcacaggctctctaattatatttttctaagttgattgggctattctaggtcctttgcatttctatatgaattttacagtctgtcaatttccacaaaagcgctattgggattttccttgggactgcattgaatagacaggtcaccaaggataacatcaagaccttgctgtgtcaggccagctcctagcaacactgcagcccaagttgggagcactaggttggctcctggatgtcagtgactgctcttctcttccttagctggaaaggtactgggaaaaacctccatagtgtattttggtaaaggtatagtataatctttgtgggattccgaacaaaatattataagaaacattcatttgtgcccaagggccataaacttggtgtaatctgaatgcaataaattataaataaatggcaaacagttcttgatggttttctcttaatttttcaagttttaacatagagcgtttacaggattcaccttcctgatttagggatgggaggggggttgagaaataattagtaggcaattttttggccctgggacttttcttgtaaatgttttctttggcagccatactcttgagaacaggaagttactctcttgttacagatttaagacttttctgagccaaataacagaaagctggattagttctgaaatgaagtggggggaaaaaaaacaactctaggctcttgctggagattaatgacatcttacaaatattttaattctcccctttcctcttaacttgctacctcctaaacaaaacacactcagactgaaaaaaaaaaaaaaacaaaaaacttaactgatcactttgtagcccaaccttaaaataaaatatctttatggtgcccacaaatttatgtaaacatttttggggtgttaaagggaaggaaaatagggctgtcttaagtcgatcctttttttgttacaaaatccccaatatgaaatttagagcataaaatgtagttgtaaagatgctaatttttctatgataatcacacagattcataattttctttgatctttttaaaatggcttttaaaaatagataaaagtgtttaatcaagctttgaaaactatgcctatatgttgtttgagatggttgcaaacaattctttagaaattgttccaaatgacaggattatatcctttgactagagcatctctgactataaaacaaaggaattatttcctccaaaaagactgagtcctcacagaagggcatgctgaggtagaaataaaaaaaaattaaatttttacacttgattctaaaaaaaagttgtaatcttaatgaagttcataatctggaggaacattaattccgtgaattatctgagaactatttgtgaggattgtttttaaaattgctttaaatgtaaaagtttttattttttgcaaggattcttaaaacacagaaggccttataaaaactttgagattgagaagtaaagaacgctttcctgtaacaagtatatatcttctactagtaatctaggaagtttctatggtattaattgcagcctcagaaaataaaagagttggtctaagtgttttatttgcacttgcctcctgcacccaaattcaaatgccctggtacccaagaagtttgcctatagttgagaagggtaggataatagggccagtagctgatgggagcaggggaggatgcttccctgggctataagaacatgcctatcctaaagtcactcaaattcctaagtctgaaaaacactgtgctgccaaacacacccatctgtaatttgaatgtggccaaagacccacaatttgccacccttgacttgcattatctaatgtttttctttctgtatattatgaagaggatatttattccttcatactaactttcttcagtctgcttgaggtgatgcccttccacatcattcataatagtttcttgtcttctactattattgacaacttcacttttttaaccttataaacaattttaaattactcggagctgtcatccattagatataaaaattaaatggagcccaggaattctaggtgatgggaaacattatccagggctgtaagacatgcacaactatgggagtccagcaaaggctgataagcctggagctccagcaatgttgggtgagcatttatttaaagggagctacttgcttcctggtttgactgcataccaaatatatcttctcaacatttatgagcttaaatagatgcagatgttgccagagagtgtattgtaacattcatcatcctagaatcatataatttaagtgttgagaggcatcttggacttcggttcaatactctcattttaagcaggaggaagctgaggttcagaagagttaactgacttgccacaaagttagtggtccacaaaccctgccccataaaaacattgttgagggttgacaaattttactaccaccacctccgttctctcatctggattgctttaattgtcctatacactatgcttgactattatctcctcccaattttcaagaagaaaattaatgagaatttttttttcctgaataattcttctttatatttcgtgggcatcccttacttctctccatctccccactgttgatgattttcagagctgtgttctttctcatgtaagatggaaattaaaggtgaccagacactgattttggccaggtctagtgagaggagaggggttagtttgttttctctaactctagcctgctgctgatcactagtttatttatttcatggcctctgatggacatcagactccaaatagtgagagccatggtgtgctgacactgtagcagaaatcagttctttccatccactaaaaagacaactacctccttggtgaaacctgaaatgatcttatgaaatctcatcctgtagtgactttgcaaattacctcactcctccttttctgttttctcataaatatatgtgcagactgtctttcctcaaccacaaaggaagtgtaaacatagtttatctgatgttttatgaattaaataatttctatagccagacttatatgatgtacttgatgttttatgaaaaatcttcagtgaggcccatttaagtgtaggacagtctgccctccagcatagaatttgaaccaattctaagcaaagtttggctgttatatcctcctactttcctgccctacatactctccaaatcctagagatgagtactctggggtcttcctattatcctaaactcactgatgtaatagtctgtctggtgtgttcttcttctcagattactcaaaattctctccattttctccctttccctcctgaacaaatttcactctttgggtttaggtcatcatctcagctaggctgttatgaagaagcattttggaactaaataatactcacgtgtaaatgactaatagatcatttatgttctcaaaggaagatctttgttcaccatataatcttcttattggtggaatttcactcaatgtgtcaaagggaaggaaaataagtcaaggagaggggaaggtatttttaatcttgtttaagattttatgtcttaaactgagaggaggggccttagctacaatgtctatatagtctgtgtcaaagaccgtgtgctctttcaaggatttttttcccagtttgtgagttttttcatatttaaaaatcttacaaagttttattattcaatcacaattcagttggtcacatatctaaccagcaatcttcattaaatttattaaaaagtaaacttacatgaaatttcagagtaccaaacatttaataatttaaaaaactatgtcttcccacactatcaagatcataaaacacagtggtggcctgaaatgggacattcgtcactaaaaaacacttcagccatgtgacggtattaacagaaaagggttcttttccaccaacttgaacctcacttggctgagattttctcaccacagtctttgtatttttttttcccatgggcaactgcccccttgattaatcccatttcccttagtcctagtttttccaggcagctgagcaaacaaagatgcaggcagccattttaacgtgcttcctccctcaagccctctgggatgggccgtctgttcatcctgttcataaaccaacggcctgaatgggcttggagaaagcagcaaggatcttctgtcaggattaattttaataggccatagtctgtcacccgggaaccatagcccaggcaaatggctttaaattactatttgctgataaaaagggagatatgagctgaaaatttggttcctcatttaaaacaacttggataactaatgcaagaatttacttttagtgtggagtgcaggtactttacagcctaaacccttgggtagctgaggaaaatcttttgttgccatgggatcacagtgaaatataaagaggggaaatgtggcagtttgtagaagtatagaattttagagctggaagggaaataaaaaatgtatctgtgacttcctaaggacttacgtttagagctttatatttctgatttctgtgcagagaaacgcgattcctcttattgccccttctacttttttgtctccctctttaccaattcctttctctttcctttttttcactgtttttctcatacccaattccagttccttgttccttcccttggttcctcatccctcaccagccaggctcctgtcatttctctgtgaagctctgcactggggggcacatgaggtagcgtggtgaatgtagcccctaggcaaacaagtcaggaggccctagctcttgtctcttcccttgtaaagtgtgagaaggcagtttgggggactgactggaagggatggttttgtaaaatgacacactgatgtcagccattattgttcaataaagtcctctgtgtaccattcataagtaatttttttattagctatggccattgttttggtttgtttaaaaattcagaatgtggctgggcatggaggcttacatctgtcatctcagcactttgggaggccaagatgggaggatcatatgagcccaggagttccagaccagccctgggcaatatagccagaccccatctctccacacacacacacacacacacacacacacacacaaatcagctgggcatggtggtgcacaccagtagtcccagctacttgggaggttgaagcaggagtaacctttgagcccaggagtttgagactgcagtgagctatgattgtgccactgcacttcagcctgggtgacagagggagactctttctcaaaaaagagaaaaaaatcagtgtgttccatactcaaatggatgcttccaagaaaaatcatggaagaaaatagaatttgcttcatacttctttatgacccttggttcccatctcttcctttccagccagctcccctcaactctcatagatcatatcacttgttcatggagaaaatgttctccacattcctttacaaacatgactgataccataaaaaatgtttggtgcaagttctgtaatctttcttaaatagcccagcctgggcacttgagcaagaaggctggtggctaaaattaaacaaaacataacaaaaccaaaaacaggctgggcgcgatggctcacgcctgtaatcccagcactctgggaggatgaggcgggcagatcccttgaggccaggagtttaagaccagcctggccaacatggcaaaaacctgtctctactaaaaatacaaaagattagccaggggtggtggtgcgcgcctatagtcctagctactcgggaggctgaggcaggagaatcgcttaaacccgggaagtggaggttgcagtgagccaagatcatgccactgcactccagactgggtgacagagcaagactacatctcgaaagaaaaaaaaatgcaaagaacaaaaacaaaacccaagtgtcaatgaagatgttgagcaacttcattgctgatagagtgcaaaatggtatagatactttgtaaacaatttggtagattcttagaaacattcatttaccctatgacctagttatcccactcccaagtgaaatggaagcttatgttcatgcaaaaacctatacacaaggtttatagtgacttgattcataatcagcaataacttaaagcaaataaatacctttcaactgtttaatgtataagtaaactcctacaatggactactatacccatagaatacaacactacttagcaataaaaaggatcaggttactgatacctgcagtggcataaatgaatctcaaaaccattatgctaagagaaagaaggcagattcaaaaggctactgtatgattctacttatatgacattctggaaaaggcaaaactctaggacagaagacaaaccagtagttgccagggataggggttcagtggagaggctgactacattttggggggcatgatagaactgttctatatcatgattatggtggtcatcacaaaactgtatgcatttgtcaaaactcagacctgtacactaaaaagggggaattttactacatgtaaactatatcaataaatctgacaaagaaaagaaatatacagtattaatttgcatgttattcattttaaaataaatggtattgttctgcaacttgcttttttcacttaaccttaagttttggagattaaaccttgttgaaatctgtagatttagttccttcattttaattgacgtagttttcaatttttgctaccactataaacaatgtggcaatgaatgttctgacacacgtcttctttagtacatacaccgagtttccttaggaaggctagtacataaatgctgtgtgttggattgcagagtaggcacgtcttccagtttactagatgtgactgcatatctttcctaagtgtttctgccagttcagtctctgtaacacatgagctcctgtttctccaatcagaaagagtttggaatttttaagatttttttactttgcatttccctgaagttgaggatccttttttaaagcatgttttctggtttttccagtttcctcttctgtgaactgttcgtatttttcctttttttttttctgacttgttttgcttattgatgtataagaattctttttgtaaagtgtgagtttttgtattctggatgccagcttgctgtttatatgtataatagcctttacccttctacactacagaagtttttgccttaatgtagttaatttacaaattatttcctgtaaagtttgtaaaatgtgtcttaagaaatccttcctaaacttgtgatcattgaaatgtttttctgtaaatattatttttcaattttaaatagtagtttgttaattcctctggaattaatcctcatgtctattggaagtaggaaactatttatattaatactttttcccatatacacaaccaatctctctagcactatttatgaaaattcactctttcctcactaatcttaaatctcaaatcaagttcccatatatgcatgggtctatttcggtgttctctattttgttccattggtctatttgctgcaacaattatataaaattaataaaatgtaattaaaaggccaggcacacagtagggccaaagcaaaagctagcttcccccactcctcagtcagctctctaaccctaaagtctggtcatcagtgaagtcttggtttttctaaaagaatgatgctgtttggctcccttgttggtgatctttattcccactgacttcatctggtccaaatctctggccagcctctcctttaaattcccttttggtactagctccccactaatcatcaatctgctgcctgcatacccccaacttggcccagtgtcactatggccaagtctaggcatagaggctggacatgcttctgcattgccccataacacccccaccccctcattctccagcaatccccatgtggcggtcgggccatttctcatgctgagaggcccaacaagtgtgaagttgaacactttcagtctttgtacattgacactaatgtatcccacattagtaatccaagtgaaggaagcaaaattaaatttcttaaagaaaaaaaggctgggtgtggtggctcatgcctgtaatctcagcagtttgggaggctgaggcgggcagatcgcttgaacctaggagttcaagtctagcatcggcaacatggcaaaaccctgtccctacaaaaaaattaaaaaaaaatttagcggggcgtgggacacacacctgtagtcccagctacgtgggagggaggctgaggtgggaggattgtttgagccaagaaggctgaggttacagtgtgccgacattataccactgcactccagcctgtgcaacagagcaagacccgtctcaaaaaagaaaaaaaaggtcagaatttaagagaggaagagagggtcgaaggagggaaatacaaattcagttttggacaggttgagactgagaaacctttgagacattcaggtggtaaggcctttaccctgactctaattctagtcccagagcaaaaccccaaaagactcctgtgcttaaaagcctggagagattggtaccttggaatttatggtaagagagagttttaagagggagaaactgctcaacagggtcagatgctgtgagaaggggaaggactaagacatattccttgaatctgacagccatgaagggatccatggtgcttgcaagatggtgaagaaatggagtcagagaatgtggacaattcttttaggacgcgtatctctgaaaaaagaaggcaggtggaagctgggggcagcttttaactgctttattggggtataactgacgtgctatacactggacatatttaaagtatacagcgcaataagttttttttaattttctctttttatctctagaagtaagttttgacttatcaaatgattacacccatataaccatcaccgcaattaaggtattgagcatccccgtcactcccaaatgtttcctcctgcccctttgtcatccttcctcccagcctctccctgacaccccacaacatccgataatcactgatctgctttctatcactatagatgcgttcgtattttttacaattttatataaatggagtcatacggtgtgtaattttttcctggcctctttctcagtatactcgagattcatcagagttgttgcatgtaccagagtattcgatcatatgcacagactacaacgtgtttatccacttacctactaatggattgtgtcaagttttgggctattacaaataaagctgcaatgacacttatgtgcaagcctttctattaatatatgctttcatttacctgtttctcttaggtaaatacctagcagaagaatggctgggtcaaacggtatattttaagaaactgccaaactggtttccaaagaggttgtactattttgcattcccattagcagtgtatcaaagttccagttgctctacatcctttacaacacttggaatggtcagtctttctggtaggcatgtactaatatctcattgtgattttattatttattttttcttggatatagagtcttgctatggtgcccaggctggtcttgaacttctgggctgaagcaatccttccacctcagcctcctgagtagatgagattacaggcatgagccaccatgcccagcttctccatgtatttttaatttgcattttcctaatggctaataacactggtcttctttcatgtgcttatttttcacttatatatcttctttggtaaactgtcttttcaaatcttttattccctaatctggaaagtggtgcccatcacttctaccatatttattagaagtgagtcagttaagtccagtcaacattccatgggagaggattacattggagtgggacactgggggccatcctagaggctgtctaccacgtgtggcttcccatttcttttagggtaaaatccaaactccatatcctggtctacaaagccctgctagatctagccccagccttccacattgcttttttttgttatttgaacatgctaagctccttctccttttacggccttagtatcttctcttgcctctacttgggatgtttttccatcagattttcccacagttgatcatttgtcatttgaagtcccagcttaaaagttacctcctcagaaaacccaacctcagtcacccaatcaaagtagtctaccagtcactccttatcaaatcactctgtactaattctctatgtgactcttagtactgatagaataaaagtttcaatgtaacaggaaatttctttacctcattcatcgttatatcaccaaatcctagaatagcgtttcacttgtgatagacgctcaataaatatttacttactgaacaaatgaatgagatctccaaagaagcaagaacagatgggatccatagtatagctgaagggattaaccttggataaagttcctgtgactactgctgtttaataaacgaccccaaatttagaaaaggcatagtgaagatgtctctgctccacaatgtctgaggcttcaatttggatgtcgtgaaggctggaagtgactggacagttggggctgaaattatccaaagttttgctcactcacatgtctggtggttgatgctacctgttggctgaaacttcagcttgggatgatagccaaaacatctacgcaaatgcagacttcttcatggcttgcttgctgagttccaagagtaagcacttcaagaaagctaggtagaagttgcatcaccttttgtcatctagactagaaaaatcacttttgctctagttataagcacgcccagattcaaggatagagaagaataaccccatttcttgacaggaggagtgttaaactcacatagcaagaagaacacatttaggatgggaaatattgttgctgccattctggtcaactccaactatatcatggccagttttgtggccattcatgccccaacaatgacaatcaaagcaagaaaacagaggagaacagcctggaaattctaaacatttatgtttatcagttttacaattgattgtcagtttttatcttcaactaggtaaggacaagtggaaatcattcccaggtcttgtttttgttcagtgtccttgtgtagcttcgtggcagtgggatgtctataggtcatcttggcagcacctcacgtgactaatgaaattttcctttcccttaattctgttttgaattttccttcctttcaaacgcagccaaatttattagtttactctgagagcaacattcaggagattaatccaagtaccactggaaaagtgattcatctttttaatgagcactgaaaaacacaaacaaaaaaaccccaaaacacttgcccagattcatttttataacggatgggctctttgacaggcaactggaattctttagcagagattagctgtctgtggtttgtgggctccatttcctttcaagtgtttggttcagctgcaaacaggtataacctgtagcactcattgtttctctctttagtcttcatttctccattgttaaatttctccattttatatcttcttctctagacactgctgtgaaaatttgtgtcctagatatttattttttgtttcataaattataaaagaatactttgcctattttccttttgaagtgtaaataggctgcaagtagtctgcttctgttgtagagtgatgttttccacttgccatgcttcctggttactgacaaaattagacagtttgtgcttggatgctggtgggaatttagatctgtattatgatatcttgaagccctaagccatactgtataaaagattctatcccaaaccactgaaaaatctacacagtaatgatgattaattatataaaaagcttaagatttgcatataagaaacatttcattaagagaaagaggaatatgggggaaaggtagagaaaaaaatatgagagaaggagattgtgtcaattactacatgctatgttcctgagaggagacagaaaaagtacaattatagctccctcacagaaaggactttacaattttgttaggaaaggaaaaagaaatctcgatgcataacacaattagagaagtataatatgcttcatgcagtgaggttccaactttaactaagccctataattgtgctgaaaagaaagagaagtttggtttggaataacatgggaaggttcagggaggaggtgagacttcagccaagacttacaattggcaaggggagaagagatagccttccacaaaagggtaacagaagggggcaaaattctgaggcctaaaagaaaggcatccttgccttggggacacctgtggcctacaatcagcacatggggagttcactactgtgggagaaataaaggcctccagctggggtccaggggtggggtgagggaggcttgcggggtgcttatcactgtaaaccaaaaataaaatttgaaggtccgccctcaaccgtctgaatggacttcctcctgtagtccagggtcctccaaatttaacctaaaagactggcttaggccatgatgggaagctgaggtcagacatgcctcattatgcccttctttcttttagaatccaggaaaagctacacagcatttaatatcaacacatataccttgagtctgataagaaacacaacttactttctctgaagcctgctaactggaggcttcatctgcatgataaaatttcggtctccacaagttcttatgctaacctagacattcctttaaatcaattaccaatcagaaaaaaacttaaatttacctataacttgggagcccatcttgccccacacccgctctgctttgagttgtcccacctttgtggattaagccaatgtttatcttaaatgtatttgattgatgtctcatgtctccctaaaatgtataaaaccaagctgtgcaccaaccaccttaggcacgtgttctcaggatctcctgagggctgtgtcacgggccatggtcactcatatttggcacagaatacatctcttcaacattttacggagtcttttttttttttttttgtcagtaccacagacaaccacctgactcgaggaccttacctatttctcattcagccaatgctgcagcacgttattaacgtccttgaaagcaagtcttatacagagaaaacttattttgatatattaatgaatctgatcagaatggaccagattggggggatagataaatggttgcaattgtgctccctggaatagctttggagtttacctagatcttctgtctctttaggacagagctgcttgtgtttatatagcatcttacacaggattgagacaacttcaatttcctatatcaaaaaatcgggggagggcggtgggttatgggggtgttcaaacctcccaagtgacatctgctgtgactgcatgtcttcctactctttccactgggatgcacctctggtagctgaactataacgagaaggtaaaagctgtgtccaatacctattaagctgccttcttctcaacagctggggaggtggcgggggtgggggggggcggagggaagtcttttcaacagttttacacatttggaaataggcctaaagtgaagaaggggattttcaaattggtgtgttggaaaaggggctgggcttttgagtttgaaatctggtgctgtcacttactggttttgtgccctgggaatatttatttcagttttcatgcctctgtttttctataggcaaagtagaaaattcgaaaaggtcctcaacgagtttgtacagctgctcccactccctcatcacctcttgtgggcctttggaaatgtatgttggaggagacattttggattgttgcaatgacttgggagtgccatagcacctagcaggcagaagccagaaacaccaaatgtcttaacaatgcttgaggcggtgctacaaatgaagtccttctccaaatgcattgagccccaagaaaaatcgctgattctgaggaaccttccaactttaacaatttcaggacgtccctaagctgagctaggaggcaccacgcacaggccggaggcaccacgcacaggccagagtctcccaaatcctgtcccgcactctctcccaccttattaatggccagctcatctttcaagtttcgacttgaaccacttctcagagatatcttcccaggtgcccatcccaacgttactattatatcataatttgattctccctccccccatccccccgccaactctgtaaaccccaagtataacacaggacgttgctatttgttgactgacacatagtgcttggtgaggtcacgctggcgctgaatactttttgtataaaccgacgaacagctgatgaccgcatgaatgctcacacaaggggaaagggcgccaagccaaggagccggcgtcatccgacgtaacttccgccctttaacgctcctgcggacgcccccttctcccagtccgtgtttgtttccggaatttcaataaagctcgattcggctcgaagaagaccccgttcttccgggaaaatggcgactcccgctcgtgccccggagtcaccgccgtccgcggatccggcgctagtagcggggcctgccgaggaagccgagtgcccgccgccgcgccagcctcagcccgcgcagaatgtgctcgctgccccgcggcttcgagccccaagctcccgaggacttggcgcagcggagtttggtggagctgcgggaaatgttgaagcgccaggagagacttttgcgcaacgagtaagctggggtcccgcggagtctccgccaggctccttcagctcgagctccctgggcgctcccctcccctcccgcactctgttcccttccctggaaggtgactttgactcagtcacattcgcttcagtcctacgggcgagtggacggagggcttgctgcggcagagccgtgcctcttcctggccaggcacgtatgcctgcgaggatagctcggattgaacggctacctggcgttgcagggagttagtagcccctggtcggttttatttacccggggactgtggtggttccatgagtctgctttctaaacccttttgtcgcccgcacccctaacccataacagattgtcagcttcatctctggattctaagcttacaggaaccgtaggaaatgggaagagtgggatatgaagaggggtttattaggccgggaaagttcgaccctcattcagctggctggttgaacggattttagcaagggagccacgtaataaaagtgattttgttttttaggcagctttgttcagcagcttgttgcaaaagatggtttgaaggaataaaaagcagaagacagtagaaggatattttcagagagacttcccacgagacacttgtaagaaagtgagctaggaagggattgggagaacttttaagcatggactaatttaaatgcagttgacagagatggctgaagtttccaatctatatggaagaccactagcaaaaataggaaaattcagggagaggaatagatccaaggttgattttacttagggtgtgcagagttgagaggagagcaggacagacatttggttaatcgaaaaccaaacacttaaaagctggagaagtagtcatgaggctcaagaaagagagaaccctggaaaaatacagaaaacaggaatttcagctgtagagtgttgttaatagttgaaattgtggggatgaatgtagtgtcaaaaagaacagaggacttaaggtgtaattttttctttccatttattgtatagttaaagaaaagggaatcagaaaaggaactctgtcatccagcaaaagggacaaataaataattggttgggatcaagacatgtgttttgaccttgtgagaataggttttgaatgtatagcagtgaattaactttttggtctcaggactccgttatactttaagaattattgacatcccaaagagctattttatgtgttgtatctagcgaaatgtatttacttatcagaaatacgtctgaagtctttaaaacataagcatacacaagcacacattctattctagaacaatgatgtcatcacatgccatgtagcctctggaaaactccactgtacccatgcgagaaaatgagagggaaataatatcttagtattattatgaaagtagttttgacctaataggcccatccccacactccaccccatccccaaattttggagattgcactttaatgactgctggttcttggaatgtcttatgtgattattatatgcttaaaatacttttgctgaaattctaatttgctgagacaaatgaggcatatattccctattcttcctgcattcccttgttttttgggctatttggataatgaccattttaattgttttattcttgttttggggcagttagaaatcagatatttgacttaaaaatcagcttttctttctttgaagataatgccttgcctttttaatgttatatctcaagttaaaaaaatggctgtaatgtaatagtattcttttccatttgacagaaaattcatttgcaaattgcccgacaaaggtaaaaagatctttgactcttttgccaaactgaaagctgccattgcagaatgtgaagaagttagaagaaaaagtgaactgtttaaccctgttagtttagactgtaagctaaggcaaaaagcaattgcagaagttgatgtgggtacagataaggcccagaattctgacccgatacttgatacttcatcactagttcctggatgttcctctgtagataacatcaagtcatctcaaacctcacaaaaccagggacttggacgtcctactcttgaaggtgatgaagagacttcagaggttgagtacacagtgaataagggcccagcttccagcaatagagacagggtaccaccttcatctgaagctagtgagcatcacccgcggcatcgtgtttcaagtcaagcggaagatacttccagcagctttgacaacctgtttattgacaggttacagaggatcaccattgcggaccaaggtgaacaacagtcagaagaaaacgcaagtactaagaacttgacaggcctttccagtgggactgagaagaaacctcattacatggaagtgctagaaatgcgagccaaaaacccagtgccccagctgcgtaaatttaaaaccaatgtgtaagtaccctcggaaacaggcctgtaacaggaacgtgatatttgttaaactcaaaaatttacgagaaactgggtgtggtggtgcttgcctgtagtcccaggctactcaggaggctgaggtgggaagacagctttgagtccaggagttgtagaccagcttgggcaatataataagaccttttctcttaaataagtcaggagaatgctctaagttccgtgggctttgtatgagaactacttgtagttaggaaataacatgttgtggcaacactgagaccagcctggccggagtagaagattcatgttgaaaaatatttagttttgaaaccaaataatcgacaaggtcttttaaagcacatgggggagtgttaaattttaggatgcttagccagtatttcataataaacacagagttggagagaatttattatgacttctttttttcagaaccattttttagtgtacagctttgattagtgtactatcaaagtgtactctctttgattagtctgtgaactaagggtaaagcaattgcaggagctgatgggctttccagcagaaattatttgcatgctcactgtatgtaagcaagcagcaggtgttgtggggacacaattaagtcaagattcttaaaactcctttgccttttttgatgttaaatctcaagtttaaaaacatggctgtaatgtatacatgtgtaatgtaatacaataccatgttcttcaaggagtttaagagctacatgaggacccaaggtttacacacttggaaaagagttaagctacataataataacagtttcagggggaaggaagctgagaagaggtttgaaaaactgtgaaaatagattcaggcaggataggcaaaaactctgcttatcagttccttgccataaatttgtttctgaaatttcaggaaaagtaaaatctttttgaaaataattgctatttacttgcagcaaatgtaacattcaactcaggtaactggtaccttcttcctatattgtatttacaagtatgtaacatcaaagttaaatcactactacctttctttgaaaaacagaaaacctctagtgaaaagtatctaaaacatgcttcttttttgttagactttaattctaccccagcattcattttaacctcaaaacattttatttctgctgtatagaaaatcaggattatactacattaacgtgatcaagtactctcttgtgtacagtggggtatctttcttcacttccaggatgacattttagaaaactagaaccatcatctagtcaataaataaaacaaagaatacattaatcccagttctgtattatggtcatttagctgggagtgggagagaggtaagggaatagtgaagagggctaccaagaattcaggaagtttaagagacagggagcctcctgtataagttagaggagaacaggaaaggcagggctttgaggagtccttaggccatagacaggtagggattgagagggttccgtgtgagaggtggcttggaggttggaaggtggggtcaggtagtgtcctttgggtcctttctgctcttccttctgcatactcttctggcttcatgtatcacctggatgctggaggctgacccctgtgcacctctatcccagatcttcccagaactttaggtttgcatagccaattaaccatgaaacttgatcacttgggtgttcccaggtacctcagcttaatgatgtacaaagtggaactgcagtttctttccaaggtgatttccatattccctaatagtgccaccaccttctcggttttcttcccctaaggtatcttcgatttttctcatctccatatctgctagccatgaagacctacttatttctttgatcttcatctctataattgttcttcatcttctgtcgaagtgaagactctcatctctctcgggctgtaattgtggccccttctacctctagtcttaactaccagtctatctccactgctgccagagtgaaatttgtaagatggaaatccgaacttgttacggagaactcttcattgcagtctgggcctaggctacttcccagccctctttctcgctgtcttttctgtgtagccagaaaagctgagtctgtctaccttctgtactttctctcactccccttgctgggatgcacttctctccttatttacatgggtaagcagttattattccaagactgttcaaagcttttttgaaacttttcttagcctccctgtctcccactagaactggccatttccttatgttccaatgtatcttgttgagatatctatcacagtatctctggtattgtattgcactgaaactttacatgtgtatttctttctactgggcaataagcccttttgcaaatgttctttgaataaatgaaaaaaaaaaaaaaaactccagatgaaatacaaggtttgaataaggaaggaaaaggcaaagagcctgtatgcacacaaacacacccctatttgttagagcaatgaatactggtaaattacttactgttacctttggaggagaattaattgctaaggtaaaggccatttgtgtgaatgttttaaatgtgtctacaaataaaataatctgattgtataacacaagttttcctttcatcaggttaccttttcgacaaaatgattcatctagtcattgccagaagagtgggtctcctatttcctcagaagagcggcggcgcagggataagcagcatcttgatgacatcacagcagctcggcttctaccacttcaccatatgcccacgcagctgctctccatagaagaatccttggcacttcagaaacagcagaaacagaattatgaggtatttagagtattttttttcttgtctgtttgttgggtgctgcttacataagctagaatttactccaggttcaaggaggaaggaatggaatagaggggattaggtgcttccatgagctcagatctatgccactagttttcagagagtcacaaagttgctagaactgcaggaagtagctagagatgatcacagctaccttcaacattaaagtggtgatttgcctggagatgtggggagacttgtagaatttcatgtcttaaagctcatttacctgcctgttcctgttaggatagtagtagcatcgcatctctccctttcaccttgtaaaactcatgtgacagcttctcagtggcggactcaaacccagaccccttgttagagaatgaggagaatgtagttcccaggcttccatcttctgcagtacaggggagggcatagaaggagtgggaggataatgttgtgtagccagcagacagtgagacactgctttagagcataatctgcaggcccatgtgaagagagaaatatctcctgcttttggcagcttaatcaattttgcatagcactttgtttccatgtgttttgcattgaacttcaaacatgtatgttgagagtttgtatacagaataatgggatgggagaaaataagtgtgaaggaccataggggaacagaaaagtttagaagtatttagtaataattttagcctccaggagaacagtatcctgtctcacttcctaggtattgattagctagattttagtcaggtactagtgcaccaactagtataacaccagactgttcaggagttcgagaccagcgtgggcaacatagctagactccatctttaccaaaaaattagccgggcattggggcatgcaactgtggttccagctacctgtggggctgaggtaggaggattgcttgagctcaggaggtcgaggctgcagtgagccgcagtcacaccactgcactctgtatagcctgggtgacagagtgagaccctgtctcaaaaaaaaaaacaacaaaacaggctgttaatctgctttggcttttcataaaagccttggcatggattggcattatcaaggtgctctttttgaaaaaaaccatttttctttcagtgcattaaaatgactgtctagttatggctgtagcattgaggaagtgtttactgtctctgagctcttaaatgcctgtcctaagatatttttaggttgaattaaacccttcatctttaaattgtttttttttagcagagaagttgtagtggtaatagctcccacttttactgacccatattcatggcttgaagaggaggacatcaagaagttcaagaaagcatgagaaaagggaagaactgaattaggaatgacattgccacctaccatcagttggtggtaaagtccttgggagtttttaagtacattgccagtgtctgaaatttacttggactttttattggatactagttgctgtaggactttatttggagaggaatagtcagctttttagtattaatttcttgattttcattttgccattgaaatgtaattcccaagtctggaagtcatgattgtaattagggaagaaggtcctgtcagttgtagaaatctagacagcattagtccttctttttttttttttttttttttttttttttttttttttttgagacggagtcttgttctgtcacccaggctggagttcagtggcgcagtctcagctcactgcaagctccgcctcccgggttcacgccattcttgttcattcttgtgaacccgggaacacgccgggttcacaggcacccgccaccacgcccggctaattttttgtatatttagtagagacggggattcatcgtgttagccaggatggtctcgatctcctgacctcgtgatccgcctgcctcagcttcccaaagtgctgggattacaggcgtgagccactgcaccgggccccagcattagtcatttttgacatttgataggtcaaattgttatgtgagtgtgtatacatgtgcatgtgcccccatatttaacgcatctgtatttataagtattgtagtgctaagctcattactcagtttcttatatagaggagtgtatttcagtgcaatgttgtatattaatggaggtcagtaacttcaactgtagcaggctggtggctgtcagaagcattacccagttgtgtctgatagggcacagccatcaggcttgtattgcccaagggagcactcagtgaggtgtcagtgtccctcttattgctgattctaggtaacttcccattgaaaaattgtaaggaagagatgtgaacgtgtaactttgtgctttgctctttgttttaaaggagatgcaagcaaagctcgcagcgcaaaaattagctgaaagactgaatattaaaatgcggagttataatccagaaggggagtcttcagggagataccgagaagtaagggatgaagatgacgattggtcctctgatgaattctgaagataatctcctaaatcactgacgttgagatgtcatcatcttacatcagactttctaactagtatcaagatcagtgtcagatattgttgagggaagtaattttataaagttacacaaaggtagttataaaaaaagcccagtttgtctttcagaaggtgactttcatgtgcttgaaaagtttaatatttgaatattgtgtttaaccacatggtattaaaattttgcaatatattgtgtattggtctgatattttagtatatagtagaacatactttttttttctttaagccaaatgaaaagaggtaactttgcttttttcctttttcttacctatcaaatagcatttattacatgtctttcagtgaaatacttagttgttccaggcacctaaaatcaattaggaagacatagttcccttcttttttgggtaatgaagggagcagtctaaagaattgtatgcatgtttgcatggggttattgagacattggatgtgaaatacctaggaagacatgtatggagaatgcttaacaaatgctcttctcctttttctgtcttcccttaggaagaacgttatctctcttctgattaggaaggacttcccttttgagtagatgctggaaagtggaggttttttttgttggtttgtttgtttggttttgtgtttttttttgagatggggtcttgctctgtcgcccaggctggagtgcagtggcaggatctcggctcactgcaatctaggtggaggtctttttaaataacctcatgttacttcaggcaaatctggtacaggagaagcccaagctaactgagctgggtgaaggcttgtgcatcacctggcttgagttccttgctgtcacagatgataggttcatgtacacaacattaatgtttgataaggaaagcattttttttttgttaaaattgaattgtcagtactttacttttttccccccaaataggtatatatagactgcagaagcttcagtcccatatataaacgttcatgtcattttagaggattatatggttgtctccagagaaattaacttacattatcaaaaaattctttgtctaatatattggagtctttaaaagtgttgaagaataaaatattaattagaacaacttcaaatgctaaggtgatgttttaccgggacttaattaaatacaactttttcctttcgaaaaagactgttcacatttgcttccaggtgtaattattgctttcattccttacccccctcaagcaaatgtgaaaagtatactgacctaagattctcattagttttagttcttaaaacgaatagtaaatgatttcacagcgtaaaatttgatgttatttctggaagctggatgatatggaagagttcatgtgcctggacacacagttccctgtaatcctgccatctagggagataaactctgttaacattttgatgttgtgtttttgcttatttttctatgcatagttatgcatttatattctcaaaaatgaaatcataatgtacattgctttgtagtctgctctatatattgtcaatatgttcccatattaaatattttgctttttagacagctgtaggatattttatttcatgggtataccataactttaagatttatttcctattcagcaatttgattatgtattataatgtaatctgtaaatagtgatatgattaacatcttaatcacatccatagaaaatgacttatttccagaagataccgctctaaaaatgaaattgttaggtgaaagtgtttttgagaatttttatatatattactcactgcagagatcatgttcatttacattcccattagcaatatatccaatgctcagaattgaaaattactacttaaaatctttgcaaattgaataattacagaaaagggctacatttaaaatttgtatttgtttttcttacttagtgaaggttgtgttttttttcatattcattggccatgctatattcattcttttgagaattgctcattcatattttttctgttgcttgcttggagaatttgctctttttttggcatataagttcttaagaatgtccgtcctttgtcatatattgtaactttttttagccttatttgtcatttaacatagtttgtggtatttcagtatagaagttgttttctttaggagtctacctttgtgtatgtgcttgaaagtatttttgtaatccaagaatggataaatgtccttattttcttctagtattttcttatttcacttttacacctatctttaaaaggaatttaaattttgtttatatacattaactaaatcagtacaagtttggggtgaaaaggaaatttttaatccatctcaaatgtatttggttatattatataaggtagggatttgattttatttcgaagaatttaccaattggttcagtatgtgaaaccaccatttcccctctgattagtaatgctatttttatagaatattaaattcttatgtgtcttttgtgtcttaggccaatttctgggccttctgggttttttctacactgtcaataattatcgctttaattggtgttaatatttggtagtacacaggttctcccttgttcttttaaattttgtgaaatataacttacaaataagtacttaaaacagagcttaatgggtaaagcaacagctgtgtaatcacaaactagatgcagaggaggtcttgccagcactccaaaatctctgtgtgtcccctcttgacactcactgtttcccccagagctaactatcctgacgtatggtaattctccctctgtccttttaagaattattttaccagttatgtgtataacaatatggtttacattttgctcacttttgacttatataaaaatagaataatact

SEQ ID NO: 75 - DNA, 125639 bp, Homo sapiens
  misc_feature (1)..(125639): GRINL1A Poly SNP
  misc_feature (87712)..(87712): n is either a or g
  misc_feature (87992)..(87992): n is either t or c
  misc_feature (89441)..(89441): n is either a or g
  misc_feature (89662)..(89662): n is either g or a
  misc_feature (89853)..(89853): n is either g or a
  misc_feature (93598)..(93598): n is either g or a
  misc_feature (94074)..(94074): n is either g or c
gctgaggctgcaagtagccggcgccgtcccgcgtcgcccccgcgcagggcgggccccgcacgcttattctgcccgggaggaacgccggcgtccagcccgctaccgaccgccgctgcgggatgctgcgctccacgtccacggtcaccctgctctcgggcggcgccgccaggacgcccggggcgcccagcaggagggtgagtagcgggggcgggagccgccgccgtcccgttcccccatcccggccgccccctctagaggggactagggatgggaaagctcgggagccagcacctggccccgacgccccaccctgggctcaactccccggtcctgtgccggctctggcagtgaccctcccgcttgaggtttcagggggcccaccagctggtaggagagggcttaggggactttatggaattcccagagatttcctctccttcctgcctttctgtcaagccgagtttattggcggcaccagtttaaaaatgaaggaagacatttgtgcagtgtccctaccttgagactcaaaagtaatgaatgtatttaaaactcaaactttccttcttccattaattaaaagaaagatggggtcacttgtgtccactagtgatagggtatccactagtgatagggtaattctggagtggggttagccaaggtgggcaaaccagaacagcagccggccgcccaggagcccgactgtgtgggactccggtttatgtaaaccactttcttctgtctgatttaaatattagcacagtgacaacaatggcagcactgaaagcttgggacagcatctccagggaaggtttccctttggaagtgctgtttctttttgatctttgtggcatcttttcccatctctccagatgctctgtaaaagaaatgctccatctttctaacacggtcagcaccttagagccacagccaggggcttggcttgtggctttttagttcttccatttatcatgatgttcaatacttatcatttggtacctctttgctctgattgagacttctgtaatcgtgtttcctcaagatttaaacaggtggttaagtccaaagcaaaacccccactggttctgtctgcgtgcaggcttggacctgcttatttgcttttacatgccttaagcgagtgatggtggtcaccttataagctgtctttcttagctctagaagaaaggtgtgttactcttgggcatgggccaactgatggattctggggtgtgtgtgtgcgtgcactcaccagacacttaggttgtgtacacaggcgcacacacacacacacacacacacacaccccagaatccatcagttggctcatgcccaaggttgacagaactccagttgtccaatcattagcatcatagagtaagatctacattgggtccaagggggtttccaaccacagtcctggccttactctaagttgggtgtttgtatttttctatggaaatctttctcaatttgaacacaattgcaactgagaaagaatgaagtcactgaaaagctaaccctgagccctgagaggatcatatgtgtgaccagactgcatgaattgcatgaaattctctgtaacttcccttccagaggtggggattagttggggtacctaacctaatacggtgggttgatacaaatgtgactagtatacaaataacatttctgaagattttgggtcaaacgtttcctttggaatatttatttaattataggtgctttgctgtcggacacattgtgacactcttgaaaagactttgccttttgaataagatggcagacgtattttggactggagaactcagggctcgggatcaggccattcagggctgtcctgggtacactggtacttgtttctggaaggaaggtatctaaagggtctagggttctgcccatctttatggtttctagctctgctcatgatttgcagatgttacaagtactatctgtgtgtgtgctggggattgtgtgtgtggtgggaagctgtgagatgttgattaattgatttattgaacattcataaacctttctctgtgtggtaaagggctggcattggggtccgccctacctgtagaggcagacattttcccaaactaacatcaaacaaagtggtgatggttatagtggggtgaagagtttacaaagttctgtagaagctaaaataaaggttcttcctgaggcatcaggggaaggcctctcactaaaggtatgtttttttgagatggagtctcactttgtcatccaggctggagtgccatggcacgatctcggctcactgcagcctccacctcccaggttcaagcagtcctcctgcctcagccttccgagtagctgggactacaggcgcacaccaccatgcttggctaatttttgtatttttagtggagacagggttttgtcatcttggccagcctggtcttgaactcctgacctcaagtgatacaactgcctcggcctcccaaagtgctgggattataggcatgagccacccagccccgcctactggtgatgtttgagtttaatcttgcaggatgagtagaatttgtaggggaattgacattattgggatactgaaaggaggaaataaccatctcaatggaatacttggcatatataatcatgtactgcataaccacattttggtcaacagtagccaggatatatgacggtggttggaatggtaggctatctcatatcgcctaggtgtgtggtaggctataccatctaggtttgtgtaagtgcactctatgatgattacgcaacgacaaaaatcatcaaatgatgcatttctcagagtgcatctccacggttaagtgacacatgactactttatcatgatggcaaattggacctgctttgggacaaaatacctattgtttagaaaagcaggaacgggatgtcctgaaagtaaaattgtagaccaaataatcattggaagtgtacctttcattgaaagttgttcagcaaatactgtattgttctgttattcctctctgatgatggacaagtgatggtcttgaacatgttatccattaaaattgtatttctggttcatccaaagagctcatcaaattgggtactgcaggggaaaccagcctatgtgggtccagatattcaagccaaccagaagtggtggtgacagctgacactgagcagggactcctgcgagccagctgccaagggttatgtggctggctggactgccaccagttagcctttgttcaatggctgccacctgcaatttgtatttccttcttatctgaaatcacctctcaaggaaaaaaaaaccaacaggtggagagagtaatttctgtcagctgataaacaaagctctgaaaggcatttatggatgccaaccagcagaagttgtgaaattaaaaaaacttccttcaaaccagttgtgcactaaaaatagttttatctatggcaacagcaggaagacaaattgactggagaataaccacagccagaagatgaccttggggaatggggggaaacgattttaaaaatattgaccttgcttcatgcttttgaaaggaattttataaatgccagttagtcttgctaaatgggcctttgaaatggaaggttggttgtgtggctgggtcgtgtgctttgcggggaaggcatgtgttgctttatggcttccccacaaagcacacaaccgggtcacacaactgacctttcggcacaatacttactgccgagtatttttggctaagctgttctgatcctgggctgtggaatgatagatctgtcaaggatcttctccagcaccttgctctcttgataataaaagactgttggctggtgttgctgctatcgtgacccgtcactggcacagagaaaaaacaaaacccaacaaggtcacaggataggactatctcctagcctgcccttgctgatatttctttctatttggcaaaggcttcctctgttaaacactggaatgggcctgctagtcattgttccttggctaatgtgtccctctcccatgtcccattgctgcctgactgggctaagttgtgagggtttggaaccaaggcgtcctctgggctaagggcagggcttaaacctgtgccggtcaaaaatgatggttgtaggctcagaaaaagaggtgcccagctctatgcttttgatctttcacattgccttgtttgatagaggatgaacagacctgaattctggagactcgtaaggaaacttgatttcccctagacatttatggagatcccatggcttttctacaaaggatatggaatgtgattttgacccatttgtctctgggggcactgatggagtgctgcgtatgaggtccctgttgtagtttacctatgctgtgcatccatatctgaacaagagacctggaggctggtgtcactaagccctggtcactggggaaggctttgaagtcaattagcctcaaatgttcttgtctaattgagttcaaggagctgtgggcccagggctgactaactagagaccatgttaaatatttcaacccaagatacttctcagcactcatcatgccttatggtcttacggaattccagtacttctccagcacacagaagagcaatacagtggtgtttacctctttccctctttggtgagtgatagttcctaagtgtcaaccacactcctggctctttttcactcttaaaggccggggtgatctttctaaaatgctaaatctagtctcctgactcgtctgcttcaagagcctcctcagtactgccaggaaaaagttcacactccttagtgtagcatccaggccctctggtttggcccgtgcctgtgctgtttcccctccctatatgtggtcttctcagatattccaaatcgtttgccatttccccgagctttcgatgccgttccttgcctctttgcttttcttcatgtttctcctctgatgagtgttgtctcctctaggaagcctgccctgaaacctcaaccctccttctcgtgttcccctagaggcctgtgcatgccaccattacttgcgtcacctgtgattacctactggaagacagggcttaggaaccacccctccccaggcctggtggaataggcagttaaaaacagaaatctcaccaggtcctacgtagaggagccacagttaacattgaattggcaaatggaaaaacaggaagagaagccttgggttaaatccatcccatcacttctgacccacctgggcaggaaacgggtgacaaatacatgggaatgctggcccaggtgaggaggttgacagttctgggaagtcctccaaatattcgagttgcctcatcctgctgcacagttggagcttcatccctttggttcagtcagtggttctcaaccagttatacacagaatcactgggaggcttaaaatagccatgtcgaggcctcatcccaaaccaattaaatgggaacatcttaaagtacagaaaagcatgagtattttttaggaagcttcccaggcgattctaatgtgcagcaaggctaacaatatttctttaagcattactcccttctatagctttcttggaaatgcagacactcctgggacagtgttgcagaaaggtcccttgagccttgtgggatgaagggcagggtggtgatggggcagggagggggagtcctcgcactccaagtcacactggcatctttgtgtgccttcatccacctgtgttttctctctggatcttggcgtttggggcacattgtgtgcctagtacagaacacagccacagaaagcaggaatgttttgtatgcctctgagctaagaatggttttcacaggggcctgcaaaacctaaatatttactgtctggctctctacagaaaaagttcgccccaccctgatgtagataattgggctgcaagttcagggccacagcagagccaagaggtctaatctagatggggcatacactgttccgcatgcagcctgctgcaggctcctgggatttgatccttgtgctgagcagagagtgtggggtctgttccccctagccacacttacaagggccccaccttttatcattaaggggagctgggcagggacccacagtcacaaagtggaacaggcctgagagaaatgtaaatgcacttggctaatttccttagggaaatccatctttgtaaactggcaaacccctgtcacctccctgaatcatcttctccactccctttttatttgagatagatatttttcccctgggtgagccaaggtgcctgaagttgagagcatgatgttactggatccgcagagtaccccgtaggtgagacccaggccctcatctccacaaaagggtcagaaacaaggcctgaggggacccatgtagctccccaggggccctgagttgccaaaaagggttttgttgtgctttttcttgtggaggaaacctgaatgctacctgtccctcccttgctatccttcccaggggggttggtttcaagaaagtgcaaggcactccagggagtttcaggtatattcttactttgttttagttcaacctagaaaaaactacaaaacccaacactgagcgagcgcccatcatgtgttgatactatgctaagcaccgtaggggctatattaagtggtgacggtacaaagcttacttgatcactccccctatgttttcccttccgtccattgtgtggtgcatggaacactggaggcactgaaaaatgaccagttggattattgaaatgaactcagatttgaatgttagtctcttcctccaaagatttgaatgactcctcattgtcttctgactagagccagtgcttctctatcatgcatttgtagattgatagttcagcccctatctgtttgtccatttgcctgtcctacccaggcttaggctgcaggttcttattcttggaacttgccgacatctgtgtgtttggcacagactagaacgccttgcctgatagctgtctgctgttgttatgatggtgggttctccaaacctcactgacctgtaaagtcctttctgtccttctatacccagcttaaattgtatcccgagggtccttcctgagggactttcccatatattcccacctcccattaagattagtgttcttcttcctatattcccatgataataaagaatgtttacagagtgcttaatgcgtgccagaaattgtcctaagctctttacacacattagctaatttaatcctcacaacattcctaagagggtatagtattgttagttctttttacaactagggtaatggaagcactgaagactaagtggctttccaaaggtctcaaagctagtaggtgtcagaaccaatactggaagccaggaagtacatttccactatgatttaaccacaaagctatcctgtctctctacaccttgtattggttattccaagtgttcttgattgccttgtttgggtatatttctagattatgtactccttggaggccagcatttttttttttttttgccatcgtcgtaccctcatagtccctaaaaatatttcacaagtaataggtgctcagtaactgagtaataaagtatgctgagtccagcttcctgctttgatctcctggaaggaacccttgcccccagggacagctggttcggtagcagtggtgttcagggtaggatgcagttcttcgcattgtgcataacacaagccctgaaccagctgctttgggaacccctgggaataaagtgccctacctgcctttcaggcactgccaagcctggggcatctctggagattgtgtatccgagtttcaggagaccatggagatcagcctcgtaaaatgctcggaggtaaggaatgctgccttgatgttactcggggagattttcccatggggagattgcggaaggtgaatgaatggagggaggtagactgtactcggacaactttatgggtggttcaggggttactgtccttagtgcttctgttagggattcagagtaccttttagacctttagaatgtcccccttgctgctcctgaagcagtcctgtggaaggattagtctctttctggatctgtctcttcccgacatattttctcccagtctttgttattactataactactattattattttaatcaaaaccttacatatcttaacatcgttgccaccaacacagaaatctgtttccttaagaatatcttccgcctacatctacacaagttatcagggtatatttaaaaaattaaaatgggattattcttaatgttttgttctgcaactttctttcttccccatggccatacatttggctatcttgtaaggaagatgtgtgattctgttctaagctgggtttaaattgctcctgaacagccagtccatcagtgggtcagtgtttattaaagaaaaactagctttgctccttaatgttttgatcaaagcacctctgttgacaagagtaaacttcagacagggtgctgcagtagcctcaagcgcctgctgcaactgccaaatgtctttgaggtcatatgttttattttacaagttcattttattttatgcattctgtttaccttgtggctttgtatacctcagggtattgctcagtgtgagagcttcatataagggttgcccagctcatcataggaagtgtgttgaggaatatagatgggcagatgaagaatgggctcaagccaggggagggaccatctaacttttgagtgattggacccatgggaccccctttctgaaaattatgaccattaaggattacccctctaaaataatcaaccaaccgaaagtcatcacttacagtgttaatgtctctgattcattgaccaaattgttattttcatggaaacaggactgtgaggctaagcaggtctgtttcattttgaagcatataggatgatgataatatctagataatagtaaaaatatctggctgggtgcagtggctcatgcctgaaatcccaacacatttggaggctgagacaggattgcttgagcccaggtgtctaagacccatgtgggcaacatagtaagactctgtgtctacaaaaaataaaaaattagccaggcatggtgatgcatgcctgtggtcccagctatttaggggcctgaggtcggagaatcacttgagcccaggagattgaggctgcagtgctatgattacaccactgcactccagcctgggcgacagagcaagacccagtctcaaaataaataaataatcaaataaaaataaaaatatctaatattcatagaggcttactatgtgacactctccctttatcccattttacccttgagattcagagagattaagtaactttcccgtagacacacagctagtagatgttggagcctgtgtatgtgtgtatgtgtgataggcatatatgtacgtgtgtgcacacttgtgtgtgtgtgtgtgtgtgtgtgtgatgtggtgcaggagaaaaggacttccttttccctgcagaattatgcatggactagacccagcctaataggagattgttgagcaccacaggtttggattgtctctgtggtctgagttacactttgatgcttgtgcaaatgtcagactggtttcaaccagtctgaggggcctggagccagagagttgcctttctctggagggactcaagattccctactcaagatcagtgttgttgcccaccaggaaagagagctacctggtagtatggcttggtttctttttggccaacatgactgacggtgagctttgaaggttgcttgtaaagttggccccacaagaggcaatgatagccctgggggtcaggccacatctgattccggggtccctgggggatgatgcttgccaagaggaggatgaggatggagagggatcttgaaaccaagtcatgtgatttaaagaactggggttgtttcgtccagaagaaaggaagttcaagggacaggaggactgcctagaaaaaggggaattagtttgcagtccgaggacaaccctgggtccattaggtagaaattctggtgtaagctcagatcagcaagttagaggtgcctggtagcaaaatgcaatgccttggagggtggcaatggtgtacgtggaagtgctaacatgggtcccaaacctgggctccctaacctgttcatggaaaatgaacaggttggtgccacctgtcaggtacatttttgggtgttgggtttcttcaaaggtgggcaggttgaactcaagagatttttgacattccctctagccctgggcttctaggctgcagggtggttttgctaagaggccaccctgtggaccagtgcagatctgtgaacctgccaaccagactgggacgggggtggagaggatttgtttgctagggctgccatgaaaactaccacaacgccattggcttaaacaacagaaatttcttgtctcacagttctggaggttagtggcccaaaattaaggtgttggcaaggttggtttcttctgaggtctgtgaaggaactctctgttccaggcccttctccttggctgttgatgggtcgtcttaatgtttatatgatgatcgccctgtatgtgtgtctctccccaaatttcccactcttataaggacaccagtcattttgatttagggccacacttatgatctcatttttacttgattacctctgtaaagaccctttcttcaaataaggtcacattctgagatgccaggaaggcggtcaggacttcaatggatgaattttagagggatgcaattcaacccatattagggagccaacagcactcccgcgaactgagcccacatggcatttcaggcatgtgatggggaccatgagtataagagctaagaaagtaagccccggagactgcctgggttcaaatctcagctctgtcatttcccagccatgtaacccttcagaggcttagcttcctcatctgaaaaatggggcaggtaagagaatctcttaccataggtttgtggtgaggcttaaatgaataaatacctgtaaaacacttagaagatgcctatacatggttagctattactattattactgttattgtcccctcgtactacagattatagtagtccatttttccctctgttgagtaggaaaatgactttgcccctaagtcacccttcgtcaacagaatatgataaatcacacaaattgtagcttctctcactgagtggtataatgcttttttatttttaacagaaatggtgcaatttagactttaaaaaatcatttaggaacctttatccgatatttcagtgaaattttttggcagcctttaataaactgacgtgagaatctcagtgactagtgacaaatattcatggtgacatagctaattaaggagtcagatgtcttaccaaaactcataagcattatattttcttctcctaagcctttccagctaactgtcttacttttagtctgtatccaacaagcagggacagcttttttttttaaattgtagcaatgtacttgtgagatttaccattttgaccctttttaagtgtatagttcagtggcattaagtgcatccacactgttgtgcaactggcaccaccatctatctcgaggatttttttcatcttcccaagctgggattccatgcccattaaatactaactttccctgtatccttaccccctggtcaccacagttccactttctgtctctatgattttgattactcctggtacctcatctaagtagaatcatacagtatttgtctttttgccactggcttatttcacttagcatagtgtcttcaaggtttatccatgttgtagcatgtgtcagaatttccttcctttttaatattgggtaatattccattgtatgtataaataatattttgtttatccattcatctgtcaatggacatttgggttgcttccaccttttggctattgtggataatgctgctatgaacatgggtatatggacttttttgaaaaaaagttgtgattaaacatgtacatgtatattgtagaaaaattaaatatataggcaagtagaaagcaccctcccttcccaatagagatatccactgtgtatattttggcttctttccctgtaactatatttttgcctatacttgtgaaatgagatcattctatacatattcttatggaaactgagccattggtaaagaaatgtttgaaatagatcaagtgatttggtagtttccttccttgagccccagggtggtgggtgcctgtgctgtaccaggctggcctggtactgtgaaggtaaggctggccttatctcctctatggctcctgtatgatcaggacagtgttccccaatggaagtaggggaaatgggctgtgagaagcccaaggtcatctggctctttctgccccaaatgctgactcctaactggcctctcctttccctctcttctaggcaaatgtttgcagactacggctgaccgtacctcctgagagtccagttcctgagcaatgtgaaaagaagattgagagaaaagagcaggtaaggtatctccgaggcaaagccccaacaagttccagcctctatacccttaacccactctcccatctcctaaccaggccattcccagaggctgggtgtctgcacctctgttgaggagaaggccctctcaaccttcccacctcatctcccgtcttcccagaagacagagagctctccctagccggctctgccaccgacgtgccctgctcttgtttcttggtgaacactatggctttgtgttaccttgaagctgcagggacactggtcttagtgacaggtgctgtggcggggaacgtgggttttcctgaaacagcccaatccagttgcttcaaagggcctattgtgagcagctggcggggctggaacctttctcagcagcttggagcagcagccgggggctctgctcccgcagaagagaggaaaggctggcaggcaggctggtgcagggaaagggcactttcttggctgggggtaggaggcattcggcaaacatttttgtgacagctcctgtgctaagtgctgaggccgtgaagataagtatgtccttgccttgggggaatttgcagttttctgggtgagacgatgatgtgatatttcaggtgttaagatccagccctatatgacggaatctgggaacacagagaagggaataactgactgcttgggaggtgacagtgaagttggaggcttgaaggataaagaggaggtcctgctgacctctaggcctgtggtcctggccgacccattttactcattcataattatggggcacctactgtattccaggcactgttgtatacagtgggaatatagtagggaacaaagcagtaaaccaaatctgtcatccatggaacttatattctagtgggacaagaatggaagtaaacaaaataattaagtacattttatagaggttaggaggtggtaagtgctgatggagacaaagtaaaagaaggggtaggggtgccaggaagtaggcagtactttttcttgagcatgtattttatatgattataaagtaaaacaaaataaaatgatataaatttcataaatggagtcataacatagtgacctcttgaaatacaagcttgctttagagttaaccactaatgtggtcaactataaaaaagaaagcttctcatcgatggctaagtgtttgataatgtccctaagtttaccataggtctctgtctctccttgccctctcctccccactttctaccaaggacagagagctgcctgtgctgatgcaaatgatgaatgccagggaaaggaagtagggagaaaagcaaatgaagttctgactagagaaaggtgaggagtaaaattgctgatctgcctaaaaagagtggatgagttccactaaaaagatccagaaaaacagctagttctgggttgcagaagggaaaagatgagggggatatgggacctctggaaaataaggtttcactcagagatgaatggggtcctagtaaaggacctagcagccagtttgaatgggctttcactggccaaaatgggaacagctggagcatcaaaaagaataatgacagtcatggcttataacacatcgaatattaaaaaaaatccatacgtttgtagtgataattggagaaggggagtagaggcacgagatcagaggataaaatagggaaggctcccttttttttatagaacactagctaataagtttagaaaatctttgttttgtaacctccaggtatactcatcaatagatgcaaaaataagttggtgaaagattattgtaggatattctcaaagtatcaccccagcggattactgattctaaagggacagtaccttcacagtggagtaggcaggcagccagcatttcaaccaagtgatccaacctaacttcaccaatagtggaacgagctgatgttacatgacttctgaggtgattcacctaagaggtgcacatcacatatgtaatattcatgccaaacttgtttaactgaatctaataataaggaaacagaaaaccaaaatgtgggacattctgcaaaacaattggcctgaatccttcaataaattcaatgttatttttaaaaaagatgagaatttgttgcagataagagactaaagagacataacattaaatgtaatgagtgaacctggattagatggtggcaaaaaaaattatataaaagatagagcacatggacgcaggaaggggaacgtcacactctgggggactattgtgggatggggggaggggggagggatagcattaggagatatacctaatgctaaatgacgaattaatgggtgcagcgcaccagcatggcacatgtatacatatgtaactaacctgcacattgtgcacatgtaccctaaaacttaaagtataataataataaaataaaataaaagatatactgggatgactatacaattttgtatatgaactatatattacatattattgaataaatgttaattttcttgtgatgatggtactatggttatgtagttgagtggctctttcagcttctgtgtagctttgaacattctccacagacaaagtttgggagtaaaagtcctaagcagagagtggaagtggtcaggcttcagctgctacacccctgctgatgagcaggattgagtggggccatctgtcactagggagtgtccccttctgtcctcactgctcctctccctgcctgtcccttttagagctaatggcttggtccaagacatgggtctgggctgtgtccaggtgctcagagctgcttagaacactttttgaagaagtggcctaagctggagtgagggacaggacaagggcctggtggcagtacctgttggtacagacggtagaggaattggggaatatagtcttttggagttagacccaagcttcatgccttgggagatgttcgtgaaaggtttctgagtgccaaaactggggtggtaggggctggaggaccctggagggtctgtaaccactgaagaagaatcaagtaatcccaaggaaggagcctcgtgtgtttagctgtgtcaactggagtcaacaaattgtgtgtcagtttgcctatttggcttgaatagtgcttttcaaacttgtcaataggaccctcttttttaaaaaaaaatcagaatgttttactgagccctcatatgcaaaccaagcaaaagtggtactaacgggggcccaagtcctcccagtctccctttacccctcagcccccagacaccctcctgtggttgcttgagaactccaaggccctgaggagcacaggacaggcactgctgggatagcatatgcaccaggatacttcttacaccaggtggaccaggcgtgcagtctaagtgcctatgtgtggcacattggtgactcactgcagaagaactggggtagaggggaggagggtggggctgttgtttccctagggatgaagtccttgggtggtggcagcccttgaagtttctaggggtaactgggaggctgctctgagtgatttcgtcaccatgtcctggccaggttcctggcatgagtcactgagggccagggccatgcactgtcggggagactctgtaggggccacttccttggatgtggtttcaacatggcttcccctccttggaacccatggaattgcaagaggccaaaactctggatgaccctccctggtcacgtaactttggttcctttgaaggggcttcttctgtgtgcaaaggccaggggattggagctggctcagatatgtgagtagaaagttgtaaatggcccgattgacttctgttgcagtgagacttctcaaggatttccagggccctgttagagccgcacatgatgagggcagcctgggccttccttagtctttcacactgttctgggaggtgtttaatattgcggggatgccacgatgccatgggacagctggccatgcatagaggctgctgccagttgggccattcttccgtttgctgttctccagttattggagaaaggaattgctcccaatgtgggtgtgttgtggatggcgtattttgcccatttccacaaaggtgtgtttggaggctgctggatgcaattacaacagagtcagcaccttcttatggagtcaagggtttgtggggtgtatttggaggtttcctatccctaaggcagatgccctggctgcctgttccttttagtccttcaggagacatcaactgccccgacactgctttatgctgaccacagatgagctcccaaatgcacagcttcctcatctttaaagtagacacaacaatgcctggtttcaaattgtaaataagctaatatatgcaaaatgcccaccacagtgtccggtttataatatggattaaagaggtaatgactaaacactgaatctcttccctttgaatgccaaagccagtggccctgggtctttgtttttacccccttagaccttctggagttattctcctgcctgaagctgcctgtctttattttccaaacacatagcatctcttccttcctcataacccttgctgaggccctagccatgcttggagtcccttcactgccatgtctcagtttatctaagtcttccctgtccttgaaggctcagctaaaggcccacttcctttctgataacttcccagacttctatgtgctggggtggtcactcttcccttaacctacaggacacccaggctgcccctttcacttggcacctagccacgtgctgctaagaactccacataggtatagatatatatttttgcaaaatttgtatataacatgtatgtaggcacatacacacacacagagaaatgaggttgagtctttttattctctcttcccaaagcctaggtggctgccttgcacatagtaggtgcttaatgaatgcttattgattatgatgattgagttttatattagcttcctagggctgccacagcaaagcatgaaaaacgagatggcttcaataaccgaaagtattctgtcacggttctggagttcatatgtctgggatcaaggtgctggtggtgcctcctctgaaggctccagggggagaatttttctttgccgcttccagctgctggtagctcttggtaatccttgccttgtggcagcatcgctctgattttcacatggcattttcatgtgtctgtgtccagattttcccctttttatagggacaccaatagggcccagtctgatggctttctcttaacttgacctgctctccatataattcctaggtactggaggttaggactccagcatatctttttgggggacactcttcaacccataacaggttctttgaggaaatcaccttgaattatagtaacaactcagatgaattagctgtgggcttttatttgaatattgaacattaaaaatcattaataatatgggagggaggatgctgattagtttgtgggcacaaattacatgttgagaaattgataaatgtagaatataatgtttataaacaggctgaacattcaaattaaaattggtaatagttttgaaattaagtacctgttgttttcaaagaactctctgaatttatgtatccatattcttatccatagtcatgtgcaacagattcctatgtgtatatgcagggacacacacacacagacagaacccacaccagctattgcagacttagcatattgaatcagggcctcactgcacagttgaattttagggcatctgatctgagttgattctgcgtctttatgatggtaaagtcctttgcaaatagataaaatagcttgaggcagataccgttttaaatagctattaacatcccagctttggaggtgtccttcagtgacctgttgtttttaaagaagctgttttctctctagatctttgagaatgctgagtgagagagagagcagatgcgtgggtatggatgtagagttgggaactttcataacccaataaaatgttgaaaaggaggaagtccttgccagtaggttttatagtcctctttcctttaaaagccttggatgaataagcctgctgagttctcgtccttggcgtgactgtttatacaacctcgcgggctgttgccaagtgagcgagtgtgctgccatgattcagagcttcaggtgggggccgggctgccctttgtgacagcacaccagggactctgcgtgcccctcagagataacagcccctggaggatggggagagacctagagtttgagtcccggcttcctcatgaacccctgtggtggttgggccagtcaggtcatctctaggggtctttgctgcttcttctagcaaatagaaatgttagtctagagccagtgtttttccaaacattcctttattcacgttgataaatgtggaagttctattggtaaagcagtcaaggtgcagcgggtggagctgaaataagatcagggctatgttggctgcctccatcaggcccccaactcttcaccctacaaccttgtcagacacggaggaggagctgggaatagtgtctgaaaacccactggactatacaactcttttccatttttctaaccttctgagactttgtgattcactacccatgaagagaaaccaaggccactttgggggtgaatatttcgctgtcagagccactttgacaactgtaatgagaacagcaaaaagaccaagaagaaggtggacggacagacagactcattcagatagacatgtagagttgagtaggaacccatatactcaaaaatgtaaagaaaccacaccaccaatactagaaactcccagtatctactagtatgctattagcacactaggtgttttgtgtgttttattctgtgtattctttagactgcccactgaaattggtggtatgatccccattttagtgttaaggaccctgaagctctttaaagtacagaaaataactttcttaggggcacacagctagtagatagtggatttgcaattccaactcaggtctgtgacgggccatgttgccatgggaacattgacttgcgtgccttctcctatcagagaaactctgtttaggatatttacattttatcagtcaaggttaccgaaggtgtgtactatacccctgggttccagaaaagcagttcctgatttttttttctcccgtgtattcttcccttttccgcgggggttattaggcctaagcaactattgtctgcgttgaagctgtgtactagctgcacactagtctgcatggaagctgtgcactagcggtacgctagcactcctatcaggctgctatcattacaaatgccactctctttgggacttctgcttggctagaagctttccttttccttctcatcttaagctttgaaaatgatcttttctcctgagtttacttaggaaatgggcactattcagtctgtgagactgtcagaaataactaaattagttttattttttagaaacagggtctcactatgtcatccaggctggaaagcagtggctattcccaggtgcaatcatagcacacgattgccttgaacacctgggctcaagtattcctcctgtctcagcctctcaagtagctgggactacaggcatacaccactgcgcctggccaagtattttgataagccagaggtttcagtttttctgagaatatttatttcccaggctgtggaaaggccctttgggctcagaggtaatgttcatttttgtccaagaaagcaaaacagtgttaagtatgagtaatgacctgggccaaataatttgctgagatagatacacaggttgtacaagccagagcacattcccgaagtgccagcctctgcctgcaagatgggcagggaacccagtggctctgtgctcagcagtcccaggttagctgctgccctctggctggagaaaagaggtctgaagtaagaagttttggaaataacttggcttccagtctggaagtcacacgagtcacattatggcccttctcaaccatattggcagccaggatgtgtgaccagctgcccctcctggctggtggggcgggggactggctgtgttagtctgctattgtcagtttgatgcatgttgagctgcatttctgctcttatttcccctaagaatgctgattgaccaagggattttctttttttgcacagattaatcctcagtgtcaaggatgactgtatactccaaatattccatctttctttttcccttcaaaatgtatttatggagcatctatttatgctgggtaccagagatagagcagtgaataaggcagatgttgtccctggctttttggagcttgttgcattgtaggatcctatcttctcatttaagatttggacaatatcattggccttgttaacgcagactcttcaatggccagtaaatcccttaggagaggaatttaggctgagttagttttctgtagctgctctttctttctaaggcactggctgccagatgtatctttagggaggtcagccatagtatggggcctgtaggtagaatttatgctgtgagtactcacaggaaacagcttaatccagagattctgcgtatgtgttgggagtatggaatgccctttcagttaattttccttctttcctactttctttttattctacactttaattaagccttttattttctttttttttccgagacggagtctcgctctgtcgcccaggctggagtgcaatggtgcgatctcggctcactgcaagctccacctcccgggttcacaccattctcctgcctcagcctcccaagtagctgggactacaggcgcctgccaccacgcctggctaatttttttgtatttttattagagatggggtttcaccgtgttagccaggatggtctccatctcctgaccttgtgatccacctgcctcggcctcccaaagtgctgggattacaggcatgagccaccattcctggccaggccttttattttcaagcaaattctgtctagtattgtttcatgcccaggaggcttttaatagagtacattttttaaaatttgtttttttagtaccaagtagcattataaagaggcttttgatttttaatttaaatttaatttaatttaattttcttgagatagggtctttctctgtcgcccaggctggagtatagtagtatgatcacagcttactgtagcctcaacctcctgggctcaagcaatcttcccaccttagcctcccaagaagctgggactacaggcacacaccaccacatcaagctaatttttgcattttttgcagagatggatttttaccatgttgcccaggctggtctcaaatgcttggactcaagcaatctgcctgccttggcctcccaaagtgctgggattataagcatgagacaccgtgcctggccataaggaggttttaaaaaacttaattttggagagtttcaaacatacaaaatgagactggatcatgtaatgagtcattgatcctctctccagcaccagcaacctcaatacatggccaatcctgcctcatctacatccacgctgtataaggaaataaatatacatcatctgtatctcagcatgtttctctaaaagagactgtttcttaatatcatcataatgctcttctgcctaaaaatcaatacttttcttattgggaggtattttaaaggatacaagaggagagaaatttagccacaaacatcttgctcaacatatcagcttttttctttttttccccgtgttcagtttttgaccaaaagcatactgatattttataaaaatgatagccatctatgctcctagcagcttttctgggtatacatgttgtgaccggggtaaacattaactgtctgttcctccatctaagaagaataacaggtattcacttcatttggaccatatttatgtaccctgagtaattcccagacctctcccaacttctaaagttccctattcattcagcaagtatttattgagagactcattgcacgtcagtcactgttagatctgggaattacggtggaaaagaagacaaagtaggccctggacttgctgcaatttacagttgatagggaagcagggcttccccacacaaggatactgacatacaccaacagtcgctgggctgcagctgtggtgagtgtcgtggggaagtgctgtgagagtgaaccgagaagacctcaggggtctgaagggtcaggaaaggcgttcttgattcttgaggaagtgacatttcagcccagcagtgcagatcgagggaacagcatgtgtgactaccttgaaacaagaaggaggctggctcctaaaggaacagaagggaggcagtgaggcaggtgtggggttggggatgggcaggggaagtggaaagagccccccatcctgggcctgcctcttccaaatggccctgggacctgagagcaggctcttgggttcctacggctggagaccctgggatgctacatggagacgtgagttccagttgttctcctgactgtagcattgtagtgaaaaaagaactccaatttggaaagacataggcaggcacttgcaggctgttaccctggaagaagagaagtcatactatttacacagtagggtcattgtgaggattaaagaaaatatatattttattatatattatatgtaataaaatcacctgacaacaaatttcttccccctcctctttcttcagtaactttcttcttcacttttcctgtcagggaccatcagctccttgggctgcctcaggagtcctctcccctggtgtggctggtgctgatggccctgctccccagcgggtagagtcctggggccgtgcccttcctgggggcgttttatttagaccctgacatttacacaaatgttcaattcaaacataatgcttttttctttttgccaaaaaacattcaaagtctacaaaagaacataaaggaaaaagtgaaatctcattttcctgaggaaactgtcgttagagagctggattgcatccttctagatgttttacatacacaaacacacagtcttcaaacaaaaaatgaaaatttgaaatttatgatttttcactcagtgtatcttgatctctttctgtgtgtacaactttgagacctgggccactcgggagtgttccacagacttcattgttcctggcattgcttgtgttttccctgctccgtggcggcttcatctccctgcttgggccaggggcaggatcctctgtgtccggccacctgagttttcctgcaagccagtccacctctgaaagcctttgctttgcagaaatgcatttcaccaaagccttgtgttgtcattggcttgttttttaggaactgggtggagtctgtgactgaaagatcttgcttttgtttcctggtatttggggagtttcattagagcttttcctcttcctggttatatgtccagtaaattggggataagttaatgccagctcttgactctgctgcaagccatttaacagctcagttacccaaacttaagcacaaatgtaaggatagcatcagtgcctttggggcccagctgtaagggactcagggggaagcatttaccagaaacaagtacaaggaatcacagcttcttgcatcccatctcttcccaagtgtgggaagaagggcaagaagcaatggttgtagtattttcttactttttaaaaagattacattgaaacgaagcaaaacaaaacaaaaaacaagcaatatagaaaggtataaagaacaaggcaaaagtcaccctgatctctagcgcccctaccccatccatggttccttccttagagacctgtaagtttaatcatcatcacatagttttctagacctttctttgattttgcaaactttgaatgaatgggatcataaagtacttaaagtacataaagaacttactgttctgccacaatgaatgattttcaaatgcaaattaaagttttgtgtgttaaaaaatgctttgtgggccaggcaaggtggctcatgcttgtaatcccagcactttgggaggccaaagcaggcagatcacttgaggtcaggaatttgagaccagatggtgaaaccttgtctgtactaaaaatacaaaaattggctgggcgcagtggctcacgcctgtgatcccagcactttggggggccgaggtgggcggatcacaaggtcaagagctcgagaccatcctggccaacatgatgaaaccccgtctctactgaaaatacaaaaattagttgggcgtggtggcgcgcttctagtcccagctactcaggaggctgaggtaggagaattggttgaacccaggaggcggaggttgcagtgagccaagattgcgccgctgctctccaacctggcgagagagtgagactctgtctcaaaaacaaacaaacaaaatacaaaaatgagcccatgtggtggtatacacttgtaattccagctgacttggaagactgaggcaggagaatcacttgaaccagggaggtggaggttgcagtgagccacgatcacgccactacactgcagcctgggtgacagagtgagactccatctaaaaaaaaaagtgctttttttttttttttttttttttttgtgaatacatggcaagaatctctgtgtaaaggcagttgaaaagttagcaggacagcagaattacctttatggaatttgggtttctgtgctgtgggattgtcgaggtacctgggtcagccctagggaaaactgagagaaggtcagtttgtctgaagtctcagtccttgatcttggattttttcttacttctgtcccttccatgttgtggaggcacctactctgtccccctgcatctaaacatagcctgcagtatggggaggtgcttaatgtcagacagaatcacagagccaggcttgaatgtaggtgtgtgtccataagcaagttgcctaacgtctctgaacttcagttttctcagctatgaagtggaaaggacagaaaggacaattgctgtgtcatagagtggttgtgaacattaaatgtgattaggaatatttctagcctatagtaggttttcaacaaatcttaatttccccctttcctgcttgttaagccttcattctataaaggcgtgttaaggcttggacatgttactgtttctcaagggtatttgcatttcaacaatgaccaaaactttaactgaaggaattaagaaccagccaacaggactgggaggatccttttgggctgaagtcacaccacctcttcctggcttttcagaaatatttcatgaatggtcacaacaggttatgtactaacactacccccttttcttagaacttggccccaggaccagccctaccctcagaggacagtttggctgctagatgactgccagcctcaaccttgtgcattgtatttagtgatgaggttgaagtcatatggagaagctgggataaggggaaagacagcattattaagagcatgaggtttcaaatgcttgctcttcttactaggacaacgcaagtccgtctggtatctttgtgggaattactcttaggtgagtggacaggcccttatatacattagcaaacggtgctcttcctccggggtaaaagcagcccaagcctatgccaaatcaccttggtgaacagagactagatgggatttttgctccctccatctccactgccaggcaatgagtgctgggcacaatttgcataatcatacacagtgggcccgttattacaactgtgcatgaggcctaaagagtcattattctttttttcttttcctactttcttttagcttcttgacctgagcaatggagaacctaccaggaaacttcctcagggtgttgtttatggtgtggtgcgaagatcagatcaaaatcagcagaaagaaatggtggtgtatgggtggtccaccagtcagctgaaagaagagatgaactacatcaaagatgtgagccatttaagagtttttgccccccacctgtattctttttgtagcatgcaagagaatggagttggaagcattgaagtgaatgtaataaggcattttgaaagaattcttagtgttatcattttggctggaaatgtttctgtgtatcttcatggtaatgttaaagtacagatgtaaatctgcaaggaaggaaaggttgagcttctgctggatggatgttactaggtaagtatactcaggagagcagatggcttcctccttccgtgtagggtttggaggctcttgagtggtttttctttattgcacttaccagtcccacattcatccctggcaagaggaataggaagactgtgggtgattcagatcaatcagttgggttgaaacaaatgctaggaagtcaaccacaatagactttgtccaaccaagccaatcaatgccatttccttgtatttagtagtttatttcctatcttttaagttacatgttcttttgagaaaatttgggaaatataaacatgtatgaagaagaaaataaaatcactcataatctcactattcatccagagcaattgttaacattttggagtattttcttcttctctctctctccatttcttttcattccatcctgtgttcccctagattgactgattcccctcttgaccaaaccacccagcttatatggaagaggagatggcctgctctgacactgatgggctcacattacagaccagtggcttagaaagtgcttgtaagaggcagtgtaggggcagggagtcaacctaggcctgtgagctcacagaccttgcttcgagctccagctctgtgtctggcccagcaagtcacttttgctctgtgcaggcttcagtcctcatgttgagattgtgggggttggctgggctttgatacctaaggttaaaaacacagctttgtgagccccattttattttgtgggttttcagataagatgcaaactcatgatgtcttcgcttttgtgtgagtttttaaaaggaacatttcttgttgaatttaaaaaataataaatgcttagcagaaaatatgaggaaaagccagcaaaattagcacgcatatacataatgtatatgacagccaccaaccttaaactcctagttatcccacctttcaaacataattttaaaaatttattttattgtatattttcgagacagcgtctcactctgtcatccaggctggagtgcagtggcacaatcacagctcactgtggcgacacaatcacagcttattgcagcttctacttccccaccctcaagtgatcctcctgcctcagcttcccaagcagctgggactgcaggtgcgcaccgctacacccagataattttttgtagagacccagactggtctcaaactcctggacttaagtgaacctcccacctcagtttcccaaagttctgggattacaggtgtaaatcactgtgcccggcctccagacataatttttaaccattcagaatattcaattcctgaatttcctgttaagaatagctcagacattttaattttcttgtatttttttctcaaggaaatacatagaccttcctcacttaaatgctccggaggtatggctcctcccttagtaaccttctaaacagagtccagagtcccacattgcccaagacaaaggcaggaggagatgttggctaatcctgagctgtggatgacatgtaccaaagacatgtgccaaagacctggaattaccaccctccactgtgatccgcaacttaaaactaactttcaggtccctcctgccataggtggcttcagttccatccctggcctggtcattgcagtatttgcctttgggagggacatgcagctcaagattccacccactcaccactgggagcagcacaagagccagctcagggccacacatgaaagccgttctgcctgcctagaatgaaaagttgtacctttaacctcattttcccaaaatgtttgtacttcatggcaagaaagtagactctatttttagaattcatgtggggaagtctgggggtcttgactctcccttcccccaaatctccaccaatatccagtaacccctaataaacatgctgtctattttaaaacaatgtgcttcaaaattaagccttccaatactatgtcctaaacacttacattctaaccaaactgctatctttaggcccttcctaaaacagaaattctggagtgtgctggagaaaactcccttgagacttcctgccctatttgagggttcctgagtactttccccatcctagggataccagaagaagggaggagacagggactgtttgtaaggtcttttgttgtgttttgaaagtttttaaggtcctgctagccctctgaaagtagtactgtagagaaacttgaacagcgtttgtgtaaacaagtgtttttgggatcacttgaacttttgttatatttactgccttgcgtgttattggtgattactgaggaactgactttcaaatttatgggctccccagggttcatattttacttccttccattccagatatttgattgctctttggcagtcagggccgatagagggaaaattagaggttgctttttggtttctttggtcctcttagccatgagtctgttaaaacacattctacttgtaaaaacatgtgatgggaaaagggcaaaactttgcccaactgtcatttgagggtgataggtgaatttcaacaaaccattttttcttcagagtttatttggctaattaatatttattatgatagttacatgtaattatatataattttatgtaattaatatatattagcatatatttgatatattctatattaatatatgcctatatattttattatgtatataaaatatatacataataaaattatatatatataaattatttggataattcctaactagtttctaactagttgttgggggtgaccttctcccttaatttcctgtcttgttcttaagtttatttttatgtggggtccttctttctttttcttttttttttttttttgttttttgagatggagtcttgctctgtcacccaggctggagtgcagtggcatgatctcggctcactgcaagctccgcctgccggattcacgtaattcttctgcctcagcctcccgagtagctgggactacaggtgcccaccaccacaccccccaactaatttttgtatttttagtagagacggggtttcaccatgtcagccagggtggtctcgatctcctgaccttgtgatccgcctgcctcggcctcccaaagtgctgggattacaggcttgagccaccgcacctggccggggtccttctttctttagagtttcttaaaagttttagaaatcttgtatgaaaatgttatggcttgatctctaactagtatctttgtgggctacaggtgagagccactttggaaaaggtgagaaagcgaatgtatggagactatgatgagatgagacagaagattcgacagctcacccaggaactatcagtaagtcattatctcagttgcttggagatagggaggcatggcaggctcagagtggtccctcagtggctagtgcctaaagatattagagtatctagtgttctttatcaatagaattacattttaaataaactgagaaaattttatcacagaatgaaatttattacctaaagggaaatttttatggtaagaataatcgtattcatattcaaagcattctcaccaaagtcaggagcaaaacaaggaagccagctatcactattattatttaacattgttcttcacatactggccaaacaagagaaataaacatataggtttaaacatggcataggtagatgtaaaactatcactgtttacaaactatatgattgtatacctggaaagctcaagtgaacatgaaatgatgaaagaaaaactactacaaacaagtaaagaatttgttatttgtagcagggtataaaattttatacacacacacacagaggatataaaattaatatataatatacaaagaggtttcaatatacaaaaaattcccaaaatatcatcaacagaaaaatactacatacctaggagtcaactataataagtggaaagaaacaccatgtgcttagaaaggaagattcagcatcataagatccacattactgtaccattttaatatgacccaataaaaagaccaacaggttttgttttttataagtggagtaggtgattctaaggtttatatagaaaataaataaaaagattgggaaaataatgggaaaaaagagcaacgagagggagtagccttattaaatgttaaaagaaagtgaaaaagcctcagagattgaaacagtatcatagtggcacataaatagacaaacatcaataaaaagtactccagaaatgtacccctgtatatgataaatgtagcatctcaaaaaaggaaggaaaatggactagtcaatatgtgctattgggaaaacttatgtgctgttggaagtcttatacctggctaaattcctaaagtatcaaagatttaaatgtgaaaaataaaacccaaaagtgccagaagaaaaatatgtgtgaattcatttatacccttgaggtaagggaatgccttttcttattatgatataaaatcccaaaaccatgaaaagaaaggctgataactttgacaactttgaaatgagaaactcctgctggtaaaaatgtcaaagtcaaatgaccgggaaaaattatttgtccttcgtatcacacataataggctcattttctgaatattgaaagatcccccacgaatcaagaagaaaaaagctacaactcataaaaataggtgaaagatttgtaacaggtaatgtatactaaaggaaagatggagagagctcttttgtgtatgacaggatgctctgcctcacctcatcgtaagataaatgcgggttaaaaccatcccatgatataatttttatctattagacccgccaaagtgcaagagtgggtcaggacattgttcacaggcctgtgggcaaagaagagggttgctgatgaaaatgcaatttgctattactcttacagagaacaattcagcattatcgatcaaaattacagatgtttagatcctttgacccagcaattctattcctagcatttattctacaggtagactctcacatatgaggaaagacataaggatagatttatttattgtagcattgtttgtaatagtaaaacaattggaaacctaaatgtctatcaagtagaggaaagtggacaggcacggtggctcacgcttatgatcacagcattttgggaggccgaggcaggtggatcatttgaggtcaggagttcgagaccagcctggccaatgtggtgaaaccctgtctctactaaaaatacaaaaattagccgggcatggtggtgcaggcctgtaatcctagctactccgttggctgaggcaggagaatcacttgagcctgggaggtggaggttgcagtgagccaagactgtgccactgcactccagtctgggtgacagagtgagaccctgtttcaaaaaaaaaaaataagggaaagtaagataaacgatgtatctctacaatagaatatatgcagttgtaaattaaaaaaaaaaaaaagaaaaagcaagtaatcccttgaaggggagatacagaaagatgtagacggtgaaaaaaagcaagatgcaagaaaatatgtaggaaaaaattgctaccatttgtatagaacaggaagagaagataaacatatcaggattgttctgtgtgtgcacaaaaagttactaaaaggttaatccagaaagtaactaacaactgtttctaattgggaggcagggtggtaactgagcagggtggtaattttttataaaaatataaaagtaactttatacttttgaaatgtttgcaccatgtgagtgtattacctactgaaaaatttaagaaaaataaccttcttctagtttagccaagctaatgcttgtagacatttaaaaaaatttattattaatattcccaaagataaaagtccctgtctatgtgacgtaccttccataagagttaatatctgtgggaaagaagggcagttacaacagtcatgcatcagagttcaatttatggctgggctgtgagattaagtgcttaagtaacacctagtaccttgattataggagtggggctacgtaaatatatctccctaccccatttcttgattataggagtggggctatgtaaatttatctacctagccccttccttgattataggaatggggctgtataaacatatctacccagcccattcccactggcatgtgggaggacatttgtgaaattctcacctgcttatggaaagtcattctgccatgactgtcagacaccaatgactgtcatcaaagccaaagaattggatttgcaatagatgcataaacaagactctgctcctcgctttccatcaccatctcctacacaccctcattttctcatgctagaattgtcccagaaaccctgtctctctgcctactggtctcctccttctccaagtcatcctacctactgcagccagattaagattgctaaattattgctattgaaacacactgctgaacacaaagctgccacatgctcctgggcctggcttgctgcttcaattctgtctccactccccagagtgcacctcctgctctgctgtgccggggctgctttctgctgctcccagaggccacatggggggccttccaccctcagtcctaactgtatctagcctcttaccaatatctaggtcaagaatggcttctgactcagacatgttaaacacacacacccaacaaagacagcagcaacaacagcagcaacaaaacaactctttttttttttttttaaatgagacggagtttcgctgttgtcacccaggctggagtgcaatggcgccatctcagctcactgcaaccttggctcactgcaacctcagcctccggggttcaagcgattcgcctgcctcagccttccacgaagctgggattacaagcgtgcgtcaccatgcctggctaatttttgtatttttagtagagatggagtttcaccacgttggccaggctggtctcgaactcttgacctcaggtgatccgaccgcctcggcctcccacagtgctgggattacaaaaacactcttgagaattgagtgagaccaaagcatattctctccatggtgactacaaagaacaaggtggctgcagaagttatttcaactgggttctagttctaggagcgccacttctgagctgtttgacagtgagcaaatcacataacttctctgattgttttcttccttacaaaggacaacattctgactcctgcacagtgttgttgagagggctaaatgagggtctgtgagtaaacactatccaaaggaaggtgattcttgcccttctctctggatcatgcagatgttgacttttaatttaaagctttactttagatattgttgaagtagatgtggcttctaacagaagaaagttccagcctaactgaagattgtcgtgaacgtgtagggattgattttgtgtgactgtctcctcgatctgtccaggtttcccatgctcagcaggagtatctggagaatcacatccaaacccagtcgtctgccctggatcgttttaatgccatgaactcagccttggcatcagattccattggcctgcaagtactcatctgcttactgctatgacagggcaacccagcttaatcaagagtggggactgtgcctttgcagaaaaataagtcacagaacatccttagctcatgattcagaattctttaagcagaaccactgtgaagactgtgcccagaagacagtgtaggaaactgaaggaagcatttccaagctgagactctaaggctttgtttttgctctctgaaaaggaaatttagaccccgagtttagtgtgagagatgttgcttgcttcaccagatacccgagtggtcctcagcatcagtgcctaaccccacacgtcagccctcttcctccagtcccagtgccacaggaagtgccacctaatcacagaataacacagacttcactaaggacaatctgtactccttcatggcaagcaatataaaaaaggcctgtaaacacttttttataattagaaattattttgtatcagaaagaatcatggatattccacgtcttgtagtagcagacagggaaacagaaagacccggtatcttatatttgtgaaaatgcatgttgttatctcactttgaggcattgttttcttggttgatttggtttacaggagctaacccttcaagtgcttcccattcttactcttacaagtcccctaacatgcaaattaatttgaaaatgttcaaagcaaagcattgtatgtatttgaaatagcttcccttggtcttcatttccaaatgtatgaacaacagtttttacctctcctccaaatttatttggctcttatctttttatcctcctctcaaaagttccaaaacctatttcaaatcctttctggttctatataagtaattttagataaataaattttcatgttgggattctccacttcccctaattctctgataacagttggtatggcagcagtgacaacagcagggctcggccactgtcctggagtgggtctgggtggcctcgtgtttggggtcatctgcgatgcccatttctggtggggcttctgagtcccacccttttcctggctctcttgagtgtatgccagctttcccctggcctcaggccaagccccactgggtctggtttgctcagcagcctttgttttcccttcctcctgtggtcgggggggcttgccaaggctccctttcctcccctttcggacgctgtctcattcccagcccaccagcaagggctttatctcacctgagttcagacttagtcggtatttgtactacatctctggtttttcttcccagaaagaaaaatatatttgccagtattttctggcaattcttgtgctttgccatctggccaacactctggcatttactgcagaggtcagctgtttgagctgggccagctctgacccaggcaccttgactgattcctagttatcatgcaggctcttagtcctggacagccaaaggagccttatagctaaaaccgctgagagaaacagaaagagagagacaaagagagagggagagggagggggagggggagggggaggggaggggaagggggaggaggaggaggaggagaaggagaaggagaagccatctcacagcaggaaactcaacctggtagaggaagagggctgatgcacggtgttaggcactgatgctgaggaccactcgagtacctggtggaccgagtctgaagagagctggcttcttccttatgcaagaccccagcctcttccactggcccactctgtccactttcattattattgacagggagaccagacccttggtttgattccatagaatgtcagagctagaaagaactgagaggatctcagttttatgaatagacaaactgaggccgacagagagaaatgacatgagcaagatgcctacctagtgacagagccaggattagaaaaatcctggtctcttggaccagagtgtaggtttttgtgtggatacacgagtagaatctgtgaagccagtggggctgggggagtgggtggctggtctaggtggtttctaaagccccttgaagctcaaatgttctgtgactccatgcttccaaatagcttcagtattttctttagtatctaatcacctccttcagaaattctttttcttgattcaagtaggtttaggagtgaaaggcttatattgtccaaagtagaggctgaggaattgaggaagcttcagagactgatcatctagacaagagcacagaggtgttagaaacagtgcccaacaccagggttttcacatcttctaatgtgaaattgtagatgactggggacacagtagaagatgactttccaacggcacagattctgtggaggccatttatctctaaggagagttaaccaagtagaaaccaaagcagtaaatagcaccaccatttttttctttttcttttttattatttttttagagatggggtcttgctctgttgcgcaggctggagtgcagcagtgtgatatagttcactgcagccttgacctcctaggctcaagtgatcctcatgcctcagcctcctgggtagctggggctacaggtacacacaaccatgtctagctggtttttaaattttttttgtagttgcccaggctagtcttgaactccaggctcaggtgctcctcccacctcagcctcccaaagtgctgggattacagtcatgagccatcacgcatggccaacactattgatttaaacatccttgcttcagtgcggcctggagcaaaaattacttgtgcggcttggagcaaaaatcacttgtctgcattaccaaattctgttccttagtacttctttattactacccttctctgcctaagggaggaaggtgaaatgtttgcaggtatgtgagtattctcagtcacattgtcactatcctggcaggcagtctagaagcgcagaagggatagctcttttaagaaaaaagggaggccgggcgtggtggctcacgcctgtaatcccagcactttgggaggccgagtcaggtggatcacgaggtcaggagttcgagaccagcctggccaatacggtgaaaccccatctccactaaaaatacaaaaattagccaggcgtggtggcaggcgcctgtagtcccagctactcgggaggctgaggcaggagaatcgcttgaacctgggaggcagaggttgcagtgagccgagatcgtgccactgcactccagtctgggcgacagagtaaggctctgtctcaaaaacaaaaaaaaaaaaaaaaaaagaaaaagaataaaaagaggaatatctctattctataaagctcgtattttgttttctgatttcattgtggcaatttgggaaatacagaaaaaataaataagaaaatagatacccatagccctatcacatagtgaaaactatcattcagatttcctcctggtctttttccccccagtgcataaacatatatttgaaccaatgcttatacatatttttcaaaatgggattatactatacttactattttcaaaagctgttttttttcccatgtgaaatgatgtattataatacttttccttggaaggactccattttaatccatttccatccatcctaagcagtggcaagtggtgttggcagcagctatgggatggtatgggagaggttttcagtccctccaagctacaggggcagacctcttggccaccatgggagacccacagtccctcacagcacagggtcccagactggcagttgctgtagcctaggacagctaccccagtgcttaatgataaggggatgccccagcatgtggtgcagcccatgtgttttcacgccaccggatctggttttgtttttattttcatcctcacagaaaaccctcgtggatgtgactttggaaaacagcaacattaaggatcaaatcagaaatctgcagcagacgtatgaagcatccatggacaagctgagggaaaagcagaggcagttggaggtagcgcaagttgaaaaccagctgctaaaaatgaaggtggagtataaaagcctagatttattttctatgaacttttctcctctttacttctcccttttctcttcccatcttcaacctttccatttccttttctccattctcttcttcattggatttttttttttttttgagacagagtctcactctgtcacccaggctggagtgcagtggtacaatcatggctcactgcaacctccgcctcctgggttcaagcaattctcgtgcctcagcctcctgagtagctggaattacaggcacgtgccaccttgcccagtaatttttgtatttttagtagagaaggggtttcaccatgttggccaggctggtctcgaactcctgacctcaggtgatccgcctgccttggcctcccaaagtgctgggatgacaggcgtgagccaccgtgcttggcccagtttggggcttctccataaatgcccccattgggcatgcctttcttggcctccagtcccttcaagggctctttagacactcaccatggtgctgttgttatgtaactgagaagacgcttgggatgcccacagatctgggacgtcagaagccttggagatctcttccttcactgtttagattttctttgaggtcccaaggcctttctgtttggcttgacaataaagagctgaggggcacacaaatagctggtacttgggctgtaccccaagtacaatattctcaagaagaaaattggtgggtgactagggacactggggaatgtcccatttggccccctaggctgggagcattccttagctgaacttctaatgccctagaggcattagtgcccctcccaaatttaaactgtggatagacttcctacccggtgacaggagcagatccatgaatggctcctggagggcacttaataaattatatcttggatgaattcctttttatgtaagtctgtggtttgaaaattttgctcagcacagacttaggctatcttatgagtagcgtatccacatagtttattgctcaaagcagaatatgtgagggagtgaaaggtggtactattggtaatttagttagggagacaaactgggaagtgtgggccccttcacaggggtaggctgggtggggaagaggggctgccggtccaccgcccggtctctgtattgccgccctggggatctgctgccagttcacttggcctgccacagccatgggacagatcatctcctctgtatgttcacttctaatagggcagctcttcttttccgtgtaagagttactttctcagtaagagttacttggggggtgaaaaaagtttatgttgctaaaaaagcctgaaattactgatttaagtaatttttttcagcttaggggatttattcaatcattcagtccacaaatatttattgagtgtctactctatgtgtgtgtcctgttcagtcctgttggttccagaggtggcctgtcaccaggcatctggggacatcattaggctgcttggcaatctggctgcttccctggagtccaggcctttaactccagcccacagttgcctgttttagagactgatgcttgttttcatcctgacagtggagttaaaaaggtttctcctactcctcctattttactccccaaattgggaaaaaaaaaaaaagcttcaggaactcagggtatgttacatgacctggatgcagagtgaatgggcctccagggacagagcccttccagcaagctgtgcgtgcactgcaaatggagcacacagcacacagggtctctctcagctggtcataagctctgctcaggactttccactttggaacttcttggtgccaacacttacccagtgatgagaagggagaagtcaagggcgtcaagagagacttgtcacatcttggaaataacatcatgtaacctattgagtttgaagaatgcttcccttttccagagtttaggtatgcagcaaactcagctctctgcaataggcgataacctggaaggaggggatgagagcaaaccttctgcagcataaaatcaatggcgggaagtctgtgtgtgagaacgtggcctggcaaacaggaggcaccagccaccaccaacctaagccctgcccacctgcaactccactgactttttctcacctcctaagccaggcctgcttcagtactaggggtgccagcttagtgttccccatgctaggttggaatgtttccaaaagcaacatttaggaaagcacaagggtatggaaagggtgagtccagatttctcctttgagcttagctggtcttacctagaaactggcttggccaatgcaactgatgagattgcgtagagaaataagtttctaccttttgaaaaagtcactcatgtggagcatacctttgtcctgagaatgcccccaaaattcgtgtgaaatgccacttttatttttctgtggctctgctcacccctcttcctccctttccctgttaggtcttgctgtgtctctctgctgcagaacccagtggatgggctcactacctctgtgagtccccacatgaaatgtgcagtggaagctgccaattcctctgggccctgcaaaagctgtcgttctgaaatgagtctcgttgtaggtggaatcgtcccaagaagccaatgctgaggtgatgcgagagatgaccaagaagctgtacagccagtatgaggagaagctgcaggaagaacagaggaagcacagtgctgagaaggaggctcttttggtgtgtgtgttgtagctgccgatgtaaacttaccgggaattgttggttcattattgttggtgatgtatacgtagtagtgtttattcttagaggtgggtcagtagactcagccatgggtaagggatcaaggaattattcatctgctcattcactcccctcccctcttcccctctgcctttattcatccccgtctctactcagaatagccccttgtctctgtctctaaatacacacctttttctagctcatctgacaatttgccagcatctaagcaaaccctgggcttgcccgcagctgtgccctccctccctccatttggttctctctacctgaaatttcctccttccctatctttgatcttgcctaagctccctaaaagccttaaatgccactctctccatgcctggagtctcttccagtcatggagccagaaccattatctgtccttaggaagctcactcactctctctctgcttttactttggaattcttttatacctgccattagagtggggctgtgcgtctcacatcttggcttttccaggagattataagttcctgaaggcggggactccatgtctggctcatctgtgtccgtagaggcttaatacatgttctgatgattgactgggttttcttgttagtaatgagctgatgtattgcattatgggagaaggatctgggaattctgcattcaattccagatctggttctaattcccttacacttctggcaaatacagtgacattctgagcatctactcaatgttattaaacatttgtaggcctcttttacaccttttggatataaagacttaagggaaaaaagggaaaaaaatgtagtgaggcccattaaccagccacatgatgtatctttattcataggtgagaaccagaaccgtgaggttgagttcatgatctgtgagacactttcaggttccaaggtcatgttttaaagagaaatcgtgatctagcaaggcctgagctgattggatcccggtgagtagcctcggtactccatgcctgtacttaggagggtatatttcttttgcaggaagaaaccaatagttttctgaaagcgattgaagaagccaataaaaagatgcaagcagcagagatcagcctagaggagaaagaccagaggatcggggagctggacaggctgattgagcgcatggaaaaggtaggacacagcgttgggcctattgcccacttgcccaaacttttccctgtaggtccatctgagatacgagaggccctggatatggattcctctcacctccaaaatttgcaattaaaaaaaaaaagacaaagctataaaataaagtataaggaagtccaacaacgttctcatttttcccatgataactattttgatgcttttaaaaaatattacttgtgaaattctttagaaaaattaatattttagcagccttgctttgctggtgccccaggtgtgaacttagtttatccattgaattatcaagccctatttaggtgttacatcaacacagcagccctgttgtttctggggcatgtgtctcaagggttggcttttccttgacacgctggggacttgagagagtagggaggccccatttctctaggtgttgtaagcaggctggtgagtgtggtgggggaacctgaggaaggcgggagctcagctgggataatgaagcctgtctagtgaaagggaagaggccaggaattaagtaggaagtggaggaaggggaggaagtggtgggagaaaggaaagaggaaaagaaggaagagaaggaagagaaaggatgggtgacctttagcaggtgacggctgacttctggacccaggagttcagggccaagtctgtggctggtttctgggaatggctccctggctgcatatgagtttgcagagagcagtgacctgccaagaccctgacattattagcaccctgtgactcattcgggatgccaagaatctccaatctgatgatggaggcagaggtggggcagcaagagcaaggtcactgtcaggcttcatgtgatgctgagaagaggtcgccttagctaatggtgtttgcagcataagcccctgtactgtcccctcataaggcgaggtgtcgccactatgggaactgcatgaaattcagttctgtggagcttcagagctcactgggtgcttcgttttagctctttagctttttacttgggagagacttgggcaaactaaagagtcaattacaatctcccttctaccccctgggaaaacagaatcccatcttttattgaagagtaggtgattggcttagtcaggactaacattagtattgaccagagggggtggtggtgaagattgggcaacaagggagctttctagagcttgagtgagcttcctcccacattattgtcctcctacaacagcagaagatcccagttaactcagatgctctctctctgggcagcaggtttttctgcagcgtaaagaagcaaggtgagccggcagcatagcagggtggtctgggggagatgccgtcatacagagaaaccacaggtagtggtcatgaacataggctttagaatcagacagtctggggatttgaatcttgtgtctctttgtagttgtttgcacttacttggtttttcctaactcagtctccacttctgtaaaatgctgataatggtacttcttattcttagggcttttgtgagcaataaatgagaaaaatccacgccaagtgctaagcatggttcctcgtatatagtaagggttcgatcatttgtggctatgatttttactctgttacgaggttgcctaaatgtctaccctcagagtcaggttgtctttagcacgacccattttatgcttatcttcattgctgtcttgaggttctgaaagtttcttgtctttccccactgattttcacatggagccctcatgtgggatgaatgggtagagccaggaagctggtaaggccagccctccctgccagcatttaggaaacacaaaaccttccccaagtggtgttggcttcttctttagtgattggaaatgtattgtcctttctctaaatcttcctttccatttaggctagagaaatgctctatttattgaactaacattaggtaggccaatttacactgtttccttttcagggataaatctgtgagagcaggaatctggccaaatcgctgtctcacactacgtgaacggcatgtcctaggcagggctgtggcagtgtacgtatcctgctctcagttttggattttgctcaaggacaaaccatgtgcttttgaatggcttctctgccatatgccttagtttactgtttctcttgctgagcactgtatttcaaacacctttttttctgatcagtaaaaatcttttaaggagtgttctctaccagggacccttctggggaacagataatagtctatgccataatctgggcagtggtttcacaggtgtttacaaatgtaagaaataattgtgcagtgtacacttaagatttattgtacctcaatttaaaacaaattttaaaagtgtgctgtaagttagaccttgctctactttatgacagcctttttctttcttgttttttgttttttttttctttttggagggaggcattcacttgtgaaagcttttatcactgttatttcggggctaatgtaaaacttccaaccacataggggcaggaggaatgttctgctcaggccaggccataagaatgtgcatttgctgtagagatttaaaaacagtaacaaaaccccagtcaaagttgatctacctttgttattttaaatatttcagagataatatattcttcctgcttaaggtggactgcttccccacccctttggcctacctcttggtataccactgcttatagcttcagaagttgtggcagttaaattttcaaagatttgcttttaataatttggtagaaaagaggtttggaatctatgtagctagtaagagtttgctgggtggaatttccgaacataaagatgaggaacattagttcttagagaaggacctaaagtaaaataatctcccaattagtgagcgttatttgataaacttgcattttaaggaaatttgttacactaacatctgtaatgtatttttagcacaatttcggttatgacaggcaccatgtttttatgaacatttttcagctttgtccaaagaaatgattccagactcttttttgggcaaacttctaaatatacatatatatagcaaagtgtacaaagtgcacggcttagtgcgcgtatgtttcctattgctaccatagcaaatttccacaaggttagtggcttaaaacaacacaaatgtattatgttccattcctagaggtcagaagtgctaaaatccaggtgttggcagagctggattccttttggaagctctagaagggaatgcatttccctgccttctctaacttctggaggccacctgtactcctcaacttgtggccccctcctgcagcttcagaggcagtagcagagcatcttccaggctccttctctctgattctaaccctgctgcctcctcctccttagaagggcccaactggataacccaggatctccccattttaagatctttaacttaatcacatctgcagaattcctttctccatgtaagataacacataggattcaggaatcaggacatggacatctttggagggccatgaatctgaccacaacatatttttacaagtgaatacacctgtgtaaacaccacaagttagaatataggatattgccagaatcccagagcctcttttcttgatgattcagaaaataataaagaattttgcagtatcacaagccaccagtttaaagtattgataatcagtatttggggctataaattttcactgatcctgggctgatggaatactttggaaaatgaatcttgaatggttttatttaggatgttttgtctctgacccataaatatatctataaatacacaacaacagacttggcagttttgagccttgtttgggctttgctgagcaggtgtgtaaaacccagggggtgtcatatagacttggactccctagtgctagaattgctaaatagacattctctgtcaaacttgggatccattgattaaaatatcagtttctgtttgttttaggaacgtcatcaactgcaacttcaactcctagaacatgaaacagaaatgtctggggagttaactgattctgacaaggaaaggtaagacgtaatgcctttcgtcttgtaatggatttaggttgtggacacgctgtgtttttatgacctcatttgacccttacattttcatttgtgtggttgtaccttattacagacttaagcatacataacattgggctgagagtttccaatatggaacaagtttctttggaagcctccagccacatcctgcagatcatggctggttgttagtgtagtggaacacatcaaatactttcacaagtgcaaaagtttggtctattaatgttctccatggccttgaactccacaggatacaccttgttgatgagaaaactcatcagctgtgactaataccacttgctttggaaaccaatttaaaacatctttctttgtttccaaactttgcttagtaaaaccttgcattatcctctggcagtgagtatataaagccctacatgaaaaacacggaatagtacgctgtctgttctagaaatcaaaatgcagagaggccattcaggggtctctagtgaaggaaaacaaggttgagatgatttgagtgttttgggcaagtgacttaacctccctgagtcttgcttgtgccacatggaaattcatctttaaacgggggagacgggtatgacggtgataacagtgcccatctcactaggttactgttgttaagagaactattgggcttgctgcctgccaaatagtacgtgctgaaaaaatacccatttttccttcctcatttgcaatttcagagttttcaaagttacaggaggcttgctagtcattaacatagtgctgaggcagagatggggcacgggaactagaccaccagacctttcctccagtgcccagccccagcggccccagagaactgaagagtccaagcaatgttggagaataaattgtgctgttgtaaaacaaaagtatgaaatgttttgtgatgtggcttgctctgtttggatgtagagaaggtctttcaacttgtcccacatttgccaaaaataaaggatatgtagagcaactgtgattccagaccttttggtattctgccgttgatttcagatattttattgtgttgctggaccccttcttccccgtcctcccctccaagtaatttactggatgttccaatatgttaataaccccaaaacagagagcttctcagatctgtaaatggtgcaaaaaaattatctctcagcccctggaaaataatcatccttatatgggataaaacttgcaaatgggaacttgaaaaatagtcctgtgctcctctgttgtggtagtttgttagtaatcacactactttgtgtggtcatcacataaagtaagaagaatggatcttagagtttgatttcttgttcttggaagcatttttaaatgtttttaaatttacgtttatttttttaccaaaccttccccaaaagatacatgttttctatttttatttatttattttttttttttgtggagatgagggtctcagcatattgcccaggctggtctcaaactcctggcctcaagcagtcctcctgccttggcctcttgaagtgttgggattacaggcatgagccgccatgcttggcgctcttggcaatattctttaaagctgtgactgttgctactgctgttgctgctttggtttaggactcatttgcttttttctcctatttgtgttaggtatcagcagttggaggaggcatcagccagcctccgtgagcggatcagacacctagatgacatggtgcattgccagcagaagaaagtcaagcagatggtcgaggaggtaagcatctgcaaaaggtcacaggcctgggattgcttcctgtggtggggaagcatccccagaacaagtctgccttgcccctccatttcctgtggctcacaagccgaggtgctcaggccactgccatctaggcccagagtgggatttccccacatgtcccccatggactgatgacgatgatgcccctaaaagaggggtttcctcaggtcaaagggttacagttaagaaagctggaaagtgcagttcataagctcacccactgtgaaaggacagtgatagcctgagtgggtacccacagctcaggggacccaagggggtgatgggcagggtgaatttagcccaggtccctgcactgcctccacagccgtctgtctgtctctctctctctctctcagctaccattcttgtcctttatcgttttctgggtgtgtctttcattccctttccttgtctgtttctctcttttttctccctccttcctcgttctcttctcccactcctgcttcttcttccttttcctttgccaccatcctttctctcctaactgtctctgtaacaggaaaccaagctatacatttactgtttgggcatagtttactattctcttttttctaaatgagaaaacgggtaagttgaacatttctatttctctaagaggaacaaaatttgttttaacttgtgtcaatataatccgcctctcttgtggtgatgttccaaagaagaaagtccgtgctctgtaaagctaatcacatattattgtagttttcttcttgctcaattaaaaaatccgattgaaaaatctgatagaaaaagagcagttagtactaacagggttataagaattcccttgagtctaattctctaacctgcaaagaaaaaaaaaggtttcaatttaatcaaacatttggttggcagtggaaaaatgaaaacacattttccttatattaagtactactttaaaaagttatgttttattaatgaattattaaaattaaaagcatatctacttctaagaaataattcatgtacatgacagacaaatggaagattaaaatatatctattttattaatctctaagatattggggatattaatgttggggagttaaggtcagagaattgtgagtatgggaagggacatctttttttattgtgtgtaggataaacatacacattagataaaagtttgtccgcaaatgagaagtgcagttatactgtgttgaatcatgtacatcttatattggttcacacacaagtttctggggagcagtggaatagcagaggaggccacgcacgcatctttgcaatcgttttgtgcatccaggcaggagcactgcccataacagtaatgcggagggagatcctgccctatcgtcaacactaggtagatgtcaggagtgtattttccaaggaaaagcatcactttgccacagttagcatctcagtgagccttggccgtcggggcatagtttttctgcttttgaatttcacacgcacgaagtctggggcaagggcatcccttattttcccctatgcgagtctctaactgtgagcactacatttctcccacctcaccacaggggggtgtctgtgtcattcttgtatctaatcgttagagaactattgaacaaaacctcatactggttggcttctgattcacttaaacccttacctgtaagaggttaaggctgtaccagaatcagagacattgtttttttaaaagacattttcaaagaagtttagaattctctgtttcctaacttacttccagaatataacaaacctaccaatttgaagagagtgaaggagtacacatacgtacacacatatacatatgtgcatatgtatatgtgtatttatacatgtgtatacatatgtatatgtgtgtgtgtagggatgcatataaagatcactgtccatgctttgcttttttctacctgtgatttcatatcttccagataagcttctctaagctttgatgtggtctgtggtctggaaggcccagtcgttggaaagaaatcaccagctaaaatttaggatgccatcagagttagcaccccctaggggctggctgggtttccacagtgaatgtagaccaccaccaccaccagcaacaaaaagagagagagacactttttattcctaataatttttactgcctgatttagaaagtttgtgtttgcccagcatactacattaacttacataagaaaaaaaggatagcctagaatctcatttgctatagccatttatgtgaatattttttttaaaagttagaaacatggtcaaggggcatggacaggtgagcaccttcagaagagcaagaccaggttggaaaggagttgagaacctgagtaattcagggaactggggaagacatgcccaaggagagatgggagctgaattcacatcttagaaaacatgagggaatatgtctttgttttgtattgtgaagcaaggccaggccagaaccactgggtgacactttcaaagaggcaaattgcagctcttcattcacaacaaagaaaacatttctaatactggctgcactggtaaggcatttagctcttcatcatggttacgttctttacaaagtaagaagttgatttagaagttctctagtgttcctccacaaattctgtgttctgtaaccttaaagactgtgtggaggaagtctggtaacttcagttaagtgttcatcatataaagaattctctattgtttactatgctgtgcctgtttttgtgagctcagccttatcattatgttgcataatgagcaaaatcagcaaagtcgtaactaaatcacttcagatcacttggagcaaattttgaaaaatccggagtactgaattggtcacttgtgaaatgaatcttgaactctgactctagaagagaagtatgttttcatctgtgaactccggctccccaggcatataggcagcctttaagtgtagcggatgttaaggaccctttttcttccctcacatgggtctggaagctcgtcttcatcatagcctcactttcaccatggatggaagtctcgtctccatccattgttggtatcattttggccataatgtccatgaggaaacttagtttttttaaatgatgggcttcttttgtttagctcaaaatgtccaggtgtcactactgcgatccttgggaatccttaaatgttaagcaacatgtttcttctcaccttagtggagtatcattttatcatagtaataataaataataaaaagtaactggcccaggttttgtcatccttagctcattaatgacttgatttccatggtgggagacagtaggacttgtactatgtaggaagggctcatggtgggggtgagcccttttgaaatgaaggattagtatatatcttacggtgtcaaggtcattgagaaaagataatgcaaaacgttttctgtgaaatgtggaaccaagtccctctcactaggctagggctttctactgaattaagtctcctgtcatggatgtcagggggttgggtatctcccccatcactagttcttccagctgattctggctttgataaaaatgagagaacaaagccaaaaaagccccacgtgtgcctcttatagccggaaaatatagaaaaatgccgagggattggaaagaaaaagccctcaaggggaaattaattcattcatccattcagcagatacccaccagcacccgctccgtgctggggctgggtacacagtggggagtcaagcagacatgggccgtgctggcacggatcttacccactggtgtcacccgagttccagggtagtcttgcctttgggttttattatcctgttgaaaagctttgttgggattggtctttggtcctgaatcaagctgcattctttagattgccaggaaaggcactgggagagctgggaggagtgtaaaaagtaagagagcatcctgaggcccccacagtgcccctctgctcacacatctttgagtgtgacttcttcagtccacagagtcattcacaccctctttacctgctctcaccatggctctcctgctgccaaccaaagcagctctcctgccaaggggaaagtgatcttaaggaaaaaatcaactatttgccttccaagagggtgggtttacatttttgccaatgggcagggatattgtttagctgaataaacagtaatttcttaagaggttttttttttgttttttttttttttaagctatatcccagtgcagccattaggcatcctttcattttgtcatgtctttcttttgatttccctttgccatttgtgatataggaaatgtttcttccaacagggtctgaagggagtttcttttcatttgcagaggaggcattttctttagacttcttttgctgaaagcaattacactctaccccactttgctataattgagatgtttaataagtgcaaaggtgcaaggaattgattttctcattagtgcttctccacccaagctacacattggaatcacctggggagctttaagacatgcctgaacctggcagatgggatggaggcagactgagcattgggttttgtttcgttttaaaaactctgcaagtgattctaatatacagccaggattgagaatcgctgtcccggattctcagagcggtggcctgactctccttgctgggtttcatgttcatgcatttggccagcatccctcagaagctcctatgcctgaggtgggaagctgctggtgaactcaataggaagggctcaacagaaagcaagccagggagacagtcaccagggaccaggagcacagaagtgagaaagctggtccaagtctgtgactctctgggcactgtcaggggaccttcacttcttgccagcccctggtcctgggaggattctgtgacagctcactctttttttattttttattttgttttagagacaaagtcttgccctgttgctcaggctggagtgcagtggtgcaatcataccttcctgcagcctccaactcctgggctcaagtgatcctccccactcaacctcccaagtagatcgactataggcacgtgcacccatgcccagctaatttttgtattactgttattattattattattttttatagagacagggtttcactatgttgttcagctggtcttccaactcctggcctctagcaatcttcccatcttggcctctcagagtgttgggattacaggcgtgagccactacacctggcctgacagcctaatcttaatagctgtactggcctggtggtatccagataatacaaacttcccaaaggctatttagacccatctagagagatgttactaaggtgggaagaggtacgcttgttaaatagataatagaaacttaaagggacagaatccaatccacctaagtccttgaaagctggactaccactaagagagactaagggtgattctcatggatcctcttccaactgtgcatgtatgcacgtgtctgcctcgccctgctttaaattattcacttctgtctgtacagaagacgttacacttggccacatggtacccctttagaaagagaaggcaaaaacatcttggttaaataattatattagcaatgaccacttctcaaattcaaggcaaagcagaatattatttgtgattcctaaggaatgattttgaaagtatttaacggtcatctcttagattttttttaaagagtgatgctgtagtcataatgcagcagttccttgggggaaacaaactggatcagggagaataacagatgagtaagaactcttcagagagttgagactttgagtatctggctctctagccagttggccaaacaaggctttacattactagtccctaaatccacatgcatctgcagttagagacctttatgtgtctacaacaaaagatggcctagaaaaatagcaacaagtatggactttagcatcagacaaacctgcctttgaaaagttattagtttccttgtctataaaatagggttaataatagtatctacccaattttttgtaagagttaaatgagatgacatgtataaaatgcacagcatgttaattggatcataagaaataataaatattagtggctgttattattaccacctgtaaatgggttcggctgtgtatacctaaagttaagtgaactaaaagcaaaagtagctattgttgatttcctgagcaatgcacggggctgccctttatctttccctttgggagtcttgttggccacattcaatctttgggtatacttctctcttctcttttgtgctctgtgctgttttctagcttagccatcaatctcttcacaagaatatttatacaaaaagcgatttttaagatttaaatttgcttcatcgcaagtatctgccatttttacatggttcagtcatttgctggcacacaatttaattcaaaactgttgtgtggtgtgctgaaatgtgcaacacacgaaagtacattttactaaatgccctgtgtttagaggatttcaagtacttctcataattggtaattagccaaatgggggtaggggaaaggagccatagcaccaagcccacaaacctaatccactcaattgaactgtctccagatcatgtcgcacgagctcttctccagatttagtctccggctctttggaagatgataagttggtagcctgctctgggttggaagcgattcctttattgttcgtgattagaagaacacttgtacactctctgctgggaagaggtggtatttatctatgatgagccaatgaacaaaacaggaaggacatattatttaaaggaaaatttgaccatgtggggctcttgtttgtgaaaacacccacatactgtcaccctgacttgtacagcctcaaactgcagagtcaagagaactcacagatccacagagtatttttaggaacttgagtagacattgaagaaggaactgcaatgaaaaaggctactgaaaaaccattcagaaagatccaggtggaggcttggaagatgaatccttacttatggaaaagctgccaaagacatctgctaaggagatgggaagagagcttgaagaatgttagtgctctgggaaggaggtgctcccaccagatcacccccaagaaagtacaggagcagccaggtatccatgtggtttggttctatttgtatatgggaggtggccctgaaggtgtccttcctgaatggatatcaatactcatcttaggactcttctaagaggagtttagcttgcttctatcaccatcagcattttgcctgaattggttcaaccaacttcacgaaaaggagtgtatctgataaagagaaatctatctggctgaaatatgttgaactgaaacatccttcatgtatgttttatttttatagaggtctttcttgagattgctgcaggcattggtgttttatcagaacatggcagttttgctgagaactagcagtagtagctgcagtcatagcaatgggtggcatgagtctacataagctgggagatggggctcgtggagtgagtgcgttcagaggcccagtgtccctcagacgttggctagttctccactcctatcactccttcatggcaaagcaggcatgaagctgctttcttgctaatatttgcctttgctttcatttagatgcttctacccagcttaagcaaggagggaggggatgggaaagaagcagatgaatacttttccgcattagttattaaccattaatattgttcacctgtgcacggtgctgtgtttagacacagatccccagatacgatgctgggtattcagacttccactagggagacagaggcagatttgagaatctcatctggatgttagcttagtgttgttacctacactgttttttagggacgcctttattgctgtaatgtttttctaagtctctggtggaaaagtcactggcatttgttctagcagcattgattcattgccaagttttaaaaaaggaaataattaagagaatgcaatgacctttagagaaaacaggtcacccatgtaagtcctgctttcagggtggtgtgctttcttctgcttttagagtttcttttctcttttgggctatgaaccgtacctggaggccaggcaggccttattctggagcagatagtgagtgaggttcctagagtactgcatagcctgagagtgcctcctaagtggatgccctccacacctcctgcacttggccctggccctgggtcctaggctcattgttgatcttcttagatctgggttccttgcattgcaggacctacctcagcctgctcttgtctgcctttgctgatgcccctcaattcacctctttcctgcctgtactgtgatatggtgtgaacttgacttatactgcttgtgaaacctgagtcatgtgctgaaatcctgccccgccaccgctttcctcccttaactggatccttagccttggactccaaggctacagctctgtctcgtggccactcaagccccacccaaaggaggtgctactcaaaagtttgaggcaggagtgatttattgtgaatgacaatgttatagtttctaattctagtgtttagcatggtattattccttatttattttaaaatcttagacaatttatctaaaatgtcaatttttagaaggtatcagcacaattgtggcagccttttttctgtatgtgttatatgtattatttaaaaaagcaggttcattctatgacaggtattggtttcggtattcacaatataaattgtcttttcaagggaaaggatattttctttggaaatgtcattgaatctatgttctctttattgaaattgttctaattgactttgaactgtttctcagacacctggtgcccagtttctggccatagaaactatgtgaggctgagtaattcatgttttgggtcactaccagtcacgaatgcttctctcattccaaggctatgcatatggatgtcacattcccatgtcaatcatctctggaaggtattattcgcccagttttttaagcatgggaaactgaggcttagagtcttaaaaaataagtagctggcagtctctcagcaaataatgatggtgctgcactacagacccagatctgtgactccaaagtcagcctttgttcttttcttcttgttacttttaattggaaaaaaatttaaattgcaaaaagttgtagagtgataaaaacaaaaatccacgaatgctcttctaggattaacaaatgttgccattttggcacacttgtttctgtttttttttttttttttaaagaaaagaacacatcacagataaagaagaggttctctttttacctgtccctgattctgttccttttccttctttcaccctctcttcttctcagaggcagtttggtctctaggccatgccttgatgattttactgtgtatatatatatataaaattagtatgtggcttagtttgtgttttaaattttacgtaaattttaatttataatattaaaaataaattgtattgtacatattttgcaacttatttctcagttttgtttctgctgttattccacatagatctggattattcatttcaatggctaatatccttttatttgaatatattgtaacttatttatcctattgatagacatttttattcttttacaaacaataccaacatgtctccaggcttctctaactaggaagtatacgtaaaggaggaattgctagggcatgggattggcataatttcaccttttctagatattgcccaatcgctgcccacagtgcacatacctttccaccagtcacatgtgagagggcagattttccaaatgctcatcaccacttggcactgtgtggactataattttggccagttaggaaatggcatctcattgttttcatcttaatttgcgtcagcctgattactcattgaaacttgtgaggttgagaaacttttcttaagcttattggccattcaagtttcctcctttatgaaatggttgttcatgtcatttgctcatttttatattagattgtttttcttttttccagctgacttgtaggaactctacatcttatcaatattaatcatttatcgaaaactatttgggtgccattatcttctcctagtcaatgttttttgtttgtgatatcttttataatatataagtttttaatgttggcagaagtaaagttaatctttttggctgtgttgtgtgtcttgtttgatgtaaagatagtttctgtaatagttttgcagtttgattgttcatctttaggtcttcaattacaacctgcacatccatcccctctatcctctttcttactctgtttttctccatagcacttatcatccaataatatgtcatgcactttatttatctgttttgcatatatattttgtctgttacctgtttccttccactagaatgtaagtcccatgagggcagggacttgcatctattttgtttgtggttgtatctctaacacctgggatagtcactggcaaatgatagttgctcaataaatatttgttggacaaataatgatccatgtagaatttatttttgtgtatcatatgaataggactccttttatttttggctcacggaaagcttgtttctctaatagcattgccgtactgatttttttcacgtcgctttcgtcaagctggagttgtttcccctgtgccattgtctttgaacaatcctgttttcctgcccctctgctgaagactgaaggaaactcattccttgggcttaagagtgggaataaggatgaggaggagccaggtacaatttatggggagcttatgggacagttggtacacgtttaagaagagcctcttatgagcatgagtgcaaaaatggacatgagttcctgctctcagaggaccttctggctgacatttaaactcatttgaacttgaggcagaatgtcataggtgctggaaacacagaagctgggaaacttagtggttaagttcataggctttgagtaaattcagtctgcttttgcatcctgcctctgctactgactaggctttgtatcttgagcaaattatccaagattcagtttccttatcaataatatgggaatggtcataacattacctcctcaagtggtagttatgaggattgactgatgtgatgtgtgctaaatgcttagcatagttcctgccaggacaaactaattctgatgtgggtggagagtctttagggaggaggtagtgtttgaccaggccttgtaggatgggttggatttttctaggcagggattgaatgggtggacatgtcagacaagatatagaataaataaaagcaaaaacatgcagaccagaaagtatagggtgagttcacagagcattcatctagtttggatggtacgagggagtgagaaatgaagaggctagaaatataggttgacaccaattgtgatggtttattagcaccaagccaagaaggatgtccttcatcactctgctcataattcctcaatggctccccattgcctgatcagatatgagctccagagtggtggctctggccagtgggtgctgggtgaataggaggggagaggagcacggaggacagcaagaaggctccaaggagagccctggctagtgctagagagtgtttactttccatgcacttgaactttaggaagcgcttccaaaatgcaattttttagcatcagctttgtgccagatgtggagctaggggcttccatatatatgtattacatgaatttgaagcagttcactcccttggacactcctgttcaggatttggtgttttgtctctgaaactgaattcatcgagaaaagcacaggggtaaataagcttcatccccatctccattccatctgcctcctcttgaatcatagagggaaaaaaaggacagcctaaagaattagggccccagcagatcctttgtgacagaagatatcacatgtcaaccttcctcccagccctgccaactctccaggccagctttgcagccataggttgtcatcactgggaggatggaagcaagcaaacctctgaacagggtgtggtgtgaataggacagcctgggccttgccctcacagatgcttacttgggtcgtaatatcagccctatcagcatccagatgattgtgaagggagtgaatgaatgatgaaagtcttggcacctcagtttcatggtctggtggggataaccacatagggttgtttctgagaatcgtgagctaagccagcaaagttcctggtagcttgcatgctcctcctttcttccttctcagagaatgtgctcagattgggaagcagtttaaccgtccttccctgacatttgtacagccaagtcatgtttaggtacccgggggagccagagtgctcctcctctccttctggagaagttgggttatctttaatataagatagaaatcaaaccaaattacattattttacctcagaaccccgttgcaaccgatccttttgaatggtatagttctattattatatattacttcaaacttaataggaaaaaattgattaaaatatgtgccatgttcatatctagcctggctgaatgccacaagacacattaattgaaaatgaatttccacaaacccaatcaagcatcatgaagatgaaaaatgtacctttttccctccattccttcattgatttttcattttccccactcagtgcttcatttagcaatttttcagtttcgttttgttgtggccttaattcatttcctttactcccccccaaatgagataatgtaccattttcttcatgcttattaaactcttctttcatgctgcattagtgcagggcagattctgatcttgtcatatttctctatgcattattttttttgttaaaaataggctgagcttttttctttttattcttacattttgtggtggcttttatcaaagagaatggactttaaaaaatacagtaactatgaaattacgatgttacaggacttccaaaatagaattaaggaatgctatgcaaaaataaaacactttttctgaggaagagtgtaaaatatcaattattctcatagtcacagtgggtatgtggggaccagacacaattcctcttttgttaagagaattggaaacaatggtttaccagatcatagagggatcaagaggctgggttaaagacacagcactgtcaggaaaagagcaggcagagggagacgacggctgaagcccaagtgagctctagaaggttctgtccctgacccagtcagttcaccatttccctggatttctaggggttttgaaaacaataatggggatcttcaaagtatttccttgtaaaattttcaaattttcaaataacgtgatggcataaatttcccctgaaaaggctgtaagaactcacaataaagtatcatattcctctcttttgacctagaattcatagccctagtaatctcgttttgattagatgctttgattggcagttatacatctttgataacattttcaatgtgaaatgaattattctttcgttaaagccattttaagcagaatgtctataaatgagggcccacgagaaggaataacaaagcaggggtgttggggatggtggctggggagctttggtgtatttattaacctgtggttgagttttgcgatgtgtgcaagtacacacagccccgacactctgattttgaaaacaatgaaatgaaaatgaaatgaaaacattataaagaaatttcaaataaaataatttaaaatgtttattgcaggggaagtttatgccattacattatttgaaaatttgacaatttcgcaaggaaacagcttgaagttccccatagaaatccagggaaatggtgaactgactaggtcagggatggaattttctagagctcactcaggcttcattcatttaaaatgaaaacaaaataaaacaaattttaaataaaataaacaataatgtcaaataaatgttcaaataaaataaacttaatgtggatttaaaatactgaattccattttccttataagatttaaacagtttgattaaatgtgaccatcagttttgtttttcgttttctgtttttaaagagtttatttgagcaggcagcaccaggccacatgcaattgagggcttcacctagggggcttgaggggaaaacttttataggtgtttatggaagcaagacaaggaaaatatttgattggttaaagcagaaagtccctacttaggccacacctgtaatcccagcacttcgggaggctgaggcaagaggattgcttgaggctgggggtttgaaaacagcctaagtaacatagcgagaccctgtctctacaaaaaattaaaaaattagccaggcatagttgatcacacctgtaatcctagctacttgggaggctgagatgggaggacccattgagcccaggagtttgaggctgccgtgagctatgattgtagcactatgctacagcctgggttacagaggcaaacgctgtcaaaaaaaaaaaaaaaaaaaaaaaaaaaaaagtccctatttagaggttagaggttagttggtgttttctgattggttaaatttaaatttcattttcctaagctgtgaccattcattctgacatgggtttcagtttgcttaggtcagaacccaaggcactggagccacctcagcctaatggcctcccaattaattattttaatggttcccctcttttggctagcctttcatttgtgagagattgatcaagttttagtgtgacatcttctgttaccatcatggctggttttcctttgtttcagcgggaaactcctaagtgtgacgtcagttttaacctacctcctattatcagtaagagggggcaggagggggagttgattctacacatgacactcccagtacataatcaaagtgatgtgcaccttttatatgctctgtattggtgtgtttcctgttttacataaggcatttttcgtgtttgttatcctttgccagctggtgaaagaaaataccccaaagcacaatttcttaacagcccatgtcaagcgctgtctggtatttaatacttatttgctgctgtgttttcttcattaatttctctccaagttcaatacggagttatgtttcatgagtcttgcacaattgagtgctactcacatgactacaatgctacagccatctcattttctgtcctctgatgtgaaatggactgtgtcctacatgttactaatgggaagaaattccaggaagttgagaagcctcacaacttccagctgtggattcctcactgaatccataacagaaccatactacatttttgtacaatttcactttggtctggttgacgtataagctcttttcaaaacatattggggggactttttttttttttagctatagcaatctgtttctaacgcagtttttatttaaatgtgcagattggcaagggtgatttcagctcctgagagaagttatcttttatatgagataattgatgcactaaacacttgttccctgtgggtttggggtctagtacaagggaaaaaagtcaactaaggatggcagtaactatgatgtgtcctaacaggggtaggttcaaaggctgagctatcacagagaagggggacacaaaggcagcctggaggacttggaaagcgctggcctaggtgactgtgggtagattgtgacagcagcagtttttctggtggaaaaggggatggagggtggggaggcattcctaatggagccaccagcctgtgtgttcaaagtcctggaggcgggaccatagtgtgttcatgcagtgctgagaggatggagtgtcctaaatatagggttcattgtagggacaggatgggcatgaaatgaaagtgggaaaatagggagcacagcggaagggcctcccgtgccatgctagtgagttcgaacattaaaagcgtagggggtttttaattgggagagtgagatagtctgcattcctggtaccagagcacctgtattttgtaaaagctccctccatgggtttccagcgtgtggctatggttaaggatgattacttagctcaaaccacctatgcaggtaactcgattgtagctaatgtgaaaaaaaaaagccatgatcagttttaagaaactaaaagaacttttatttcccctccctccttaaatatcaaactggcctgtattctaagagactaacatcctgcatgattgatcgggctgcaaggcccatattcacatattcagtctgagttacaaagaaacatactcatcaaaagaaaaattagaaaaaattctattaacatcagttaaaaggtcccagattttatgaaagtgtatttttccccttgttctataaggaggcctactgttttgtatttaaatttagctgttgcaagattctgttcttgtataaatcaaataggtgaggtccagaaaatgagtgcttctaatttctcagttcttaatgccctggtttgagtttggtaacttgcgtcatttaccaccacctggtgacagctagaactaaatgcagctttgtgaagggtaaattgaaggtcaaactttaacatttaatgcatcaagaagtgagatcaaaggtgcctaatggatttcttgcataccagctatatggtaacctggattttggagtagctcctgatttgggggttgctctggggacatgtgtttagcaagatcatcttggcccaactgggcctccaagcatctgatccagacagttttccccctgaagtctatgggatggattgtttaggaatggctggatggatttgttgattcattcatttgttatctgagaatataaagatgatcaaagtctttactcttgggaaactcacagcctagggaaggagaaacatcagtaatcatataataatagctaccttttgagtgtttatcatgtgctaggtgctacaagagacaatatttcaaggttctttgaagttagtagtcagaaacaataccagccacacaagtgtgtgacttaaagtttgtaaaaaatgaaccaaaggcttgagagtcagatgttcctaggaggctatcaaacccaggagcatgtgagtctatttattttagaagctgagtgcgtcacttgggaaagggatgggaggttcttcggggcagaccactggggagactaagttgggattcaaggttggcaccccttggggccggcagtgcactgactctgccagccttagcatccttagtgctcttatctgaacaagtcaattcagatcacagaatatactagaaaagaagtttctgtaagaaatgttccaggataaaagcaaatctgcacagatagcattaattcagcacaatagcatacttgtttcttggagcaccattgctgaaaaccatgagccttgttagaagctgccgcaccctcaaatcctactcctgtccagctccttctccccagaaccaagtgtctctccagactagcatcagccctctgctctctcatgagaagtctagagaccttctctctatagcactctctctaggtgatgtattaaccattcactgatttattttttaaactaccatctaggggacagtgaccagtaggatcctctcaatatcttactatgagctgctcattaaggtgttttaaaaccacctctcttgctttccttgcctcacaagccactctgatttcttcagagacagtgaaacgagtgtatttgaaatcactttttacatcatttgattaaatattacccctgactttcttggaagcttttagttccattttgcctttcatttaaagattttaaaagttaactttaacaatcttaatactataaaaaggaatgaaaaagacataccgtgagagtaatttttgggaactatttctacaaaaatggaaggaagtttacacaaaacaaactttaaccctaccacaaccccagaagtattgcatttatccaacttctcttccagcttttactttcatcattgtaaacttttgcttttctatcccttgaggctttttgtaaactttccattttgcagtatatttgtttttagtgtttgtgtagtatactccatgaaattgatatttcataatttattaccctttcctttagtgctagacattaaggttatttagtgctagacattaatagtccatattaatggaaataaccttatttctctctattataaataatgggagcaagaacatctttatatatagagctttttcctatgtttgaattatatccttaggataaattcccaggagtgggattagtggatcaaagggtatgaacagctttatggctcttaatatttattgctaaattgcctgaagggtcatactaattcacaatgccacctgcaacacaggagaggagctgcccctcccagtcctgccaacgctcatttcttcagtcaatagttttgggcaaatttaataggtagtcaagggtaaccattgctgtttttaattggtgatgtctttaactattattaacattggacattttttcttacgggtgtttctgttctattttgtatggtttacttttcatgtcaaaggattacattttttgacaccatgtgaaatttaaaatacttgataatgaaaatgccaaatgcacacagaacagagagagtaattgatggagccctctacgttacccaggttcagcaaatagcaagatttggccatacttgctttatctactccttcctcttttttcccctcttgtgcagtattttaaagcaaatcccagacattctgcatatgtttcctatacacttcaccgtgcatctctgaacatatggactttttcttacataattataacactatcatcacacctaacaaaattaatgataattccttgctattatttaataccaacctgcaataacattttccaaagtgtcttttcttctgatgctttgttccaatcagcatacactgtgtttacatttagttatgtttctaaagtctcctaatctagagcattgctgccccatctctcccgactacttttattcgtacctaagaactgagtcagttgtcttgtaaaaatgttcacattctggattcgactttttgtgtccgtgttagctctagaagcttgattagatcaagtttcaccttttcggaaaggcaagaacacttcatgggtgatgctgtgtgtttcatcgtgtatcacttctggggtgtataatgcctggttattccaccttgggtgatgccaaggctgataatggagtcaagtggtgacaacccaaaacatgattgaatgttttttcattagcttttaccatcatggtttaatctactgatgatggatgcttgaagccattatttcatagaaattgcaaaattgtgattttctaattctgtcattccttggccattgattaactggaattattctgtcaagtaaaactagggctttttagagtctcaaaatgcagtttgaacagagaaggcaagacagatgctttattttttcctccaaactcctttccaagtaaggagttgatgccttttttacatccattggagtccagtgagctgttactgttttattctaaagacatataatagtcatgttctttaatatctttatatttcatgtgttttactcaattacactcattattatttttgatgttcagaatgttccatccttggcccaaggggagacacctcatgtccttgttttcaggcataacaaggtatctcacgttcatctagtttatttttttgtcccctgaaatgagccattccaccaagatgtcctgtgtttttttagtggggaatgctatttagagaccacaatctgcacatgttatgttcttattgtttccaagttttctcagtagatagtgtagagatacatattttacaaaagaaaataaaaattatgaattcatactgatattgtcattttaaattgaacaaaattttgtttacttctttgatttcacacttgtattgctttctcttacagtaaaaatcttggttccaaacatgatgataccacaatatacatcaaacggtttcaaaataacttcagtgttactgctaacaatcttctcagtgaatgagagattactttgcagctctatttatctttaataatccactaagaatattgagtcaaattactgtattctaataacacttggattaatacttctcaccaatttgatatacatcgtttcttcaattcagtttgttctcagattttagggttcactttttttctttttggcttcattttattttttgaatctgtaaaatatgctttcaaagttaaacctatgtaacaaggcttatgtttattacataaacctatgtaataacttatgttatcctgtctccttcacctaagttcttccctttccctattggtagctatttattaataattagggttcattttgtctttgcagtgtttcttttgcaaatacatgtgcattcatgtgtccccacctgttttacatcaaagcgagtatactgtctaccttgccatacacttcatcagtgtttttgagatctgcattttttggaaggttacacagacctccatcataccatgcatggtttaaccagtcgcttattgatggagttctgttttgtgtttcctaaaataacacatatcctttgttcatatcatttcatattttggccagtgtatctttggtatctattcctaaaaatggaattgctgagtcaaagggttaatgcatatgtactttttctagatactgctatattcgcttccataggaatagtgtcattttgcatgagaaggattttaaaatttgttttgttttcagacagggtctcactttgtcacccaggctagggtgcagtggcatcatcatagctgacttccaccttgacctcctgggctcaagcaatcctcccacctcagcctcccaagtagctgggactacagggacacaccaccacacccagctaattttttgattttttgtagaggcagggtctcactatgttgcccaggctggtcttgaactcctaggctcaagcaatcctcctcccttggcctcccaaagtgctgggatcataggagtgaactactgtgctcggcctgagagtgattttttgaaataattttgtgagcacacaaatttaatatacaggatttttggaaagttaatgtgttattaatgatcctgcatactgttcccactattatgcataacacggcctggtacagagtactctggttcctgccttcagggaagctatggtttgtctagggagacatgatgtatgattggaaaacaaagagtagtctaagatagaatatattataaaaaacaaagatggatctttttaggaagcctttcttgcttactccaggccacatgagtcttcagtcctctgaatttcaacacttttaatgagacttctaatgatccttttttcaaaccaacttttgacacttggttgaacaaatatgaatgtattgaataacacagccaaatgtttgaaatgcaggctgccctgcaaattcaagccgaataatcattttttggagagttgtatctacatttcccaaagcatgttctctggaagatcttctggctgttttaaagggttacacagcaaaatcagtgtggaaatgttggattaatcaaagctgaggagctgtgactccagaatcatgtctgctgccccaagctcacctgttcacacaatccgcctgtcttggagcgtctcgcgttaatactgttccacgaaacacagagaatcagtatgcaggctgtttcaatgaaaaccatccagccccactggaaatgaggaaaaatagaaatagaaataaaaataaatgaaaaccaagggcatctattccagttgataaacctgtacttacacaattgtacatttttgattaacaattttccatccctttctttctagattgaatcattaaagaaaaagttgcaacagaaacagctcttaatactgcagcttttagaaaagatatctttcttagaaggagaggtaaggatctctgtttctttaagttggtgtcttccctaccattaaattttatgttgctaagcctaccaccgacacttaattaaaaatatggctatttcccggccttataaaattgattgagggttaagtgccagccttgaaaatgaggttctgacagctgtttttcctttaccatcggactcccctcattccagttgctgctgacttctgctttttggctctagtttttcttattaaagaatcatcctagcaagcctgataagctgttgattagcactgataattccccgcatttgtccagtgctttataatttgtgagatatgttcatatacattccttacattattctctctgcaactttaagaaaggcaagactaagattattatctctgtattaatacatgagaaaacagaggcacagagaagacaggtggttttgctcaaggttgcccagcttaataaatgtcagagccaggctgaaagactcctaaatccagtgctctcctgtcacagcgagtgaagatgtgttagaggggacttaattttacctgaaactttcagatgcttagtattcttgactttctggctttttgaaagtcatttggggattttgtatatgttccagagaagaatattatggggttggaagaactttacaaggagaagtcaaaatctatttgctctaaaggttctttattagagcttggcattgagcctttgccttttgagacttcctgaaaagctggtttgccaagcacctgtccttatctgtgttcctcgttatagtccttccacagtgagagagcccagcagacaatgataaagtaagaagaaagagaagagaaaactttgattaagccctgctgtgtgttgggcactgttagttactttggatatgttctgtgtaacacagaagttaagagtggaatccaacttacccaagtgtgaaccctggatctgcttcttatcagctgggtgatgtgggggaagtttcttatcattataaaggagggatcataactgtgctatgtgtgggtgacagtgaaatcagaatgtatagaaggtgcctggcatgtactaagcactcaataattttaaacgtattattgttgttccctctttattaaaagggacaccctctgagttagatgatattttcccccttttttagatagggaaactgaggttcgggggtattaagaagtctgcccaaggttacagtagagatgggtaagcctggatccagatcctgagctctgaaccaccatgtttgagtgggtggtgagctgagccttcttttactctgtttttgaggggttgccttacagcagtcataaccagaagtccctcatggcccataggggcctggcaccagattcaacgcccaagagtctctgtcttttgaagctgagtaaatgggtattttccccatttccactcctgtcttccctgccacagtcattggctcagtgccagccttgtgaatgaacatttctgtttctaagattcctttctgaaattgcagctccctgtgggaggaagcacaccttccccagtaagagtcagaaaatgagtgccctagtggaagcccatgtggccaaagagaaggcagtcacaggagagaggaaagacagactgacaggagaggcagaaggtcccccaagacagtgccccccacccccacctctggctgtgctgctaaagcaagctctcctactggtagattcttaaatgtccaagggaatattgcacatggggagtaatcttagaaatagctatgttggtttatgctcagtgtattaaactcatgtctcaccttagtttgggttgctccagcccttgaaatgtggagtccagatagtttatctgggaggcgatctcaggaagccccactaggggaatggggaaaatgagacagggaagggaagagagccaatagcggtgccatatcaaggaggttgccctgaggacagctgaggctcactcctgctggggatctctgggagatggtgtggaagtggccctgagctttccttactgaaaggccagaaagctggggcatttatccactaactcccatcagtcattagctgaggcctgctctggggggttgtggcagttctagcctgccctcggcagagccagttagactctggtggtcaaaggaagcccccagatgaagaatcaccagtggcctgttaggaaacaggaatgcccagaggatgtagcggggtgggtggcagtgtcagctatgtctatctaataagcaagactttgaaaaccagtttttttttgagcatatcaataatgattatcaatttgattgattaaattccctgaaactatttaaattccaatacaaatttattatgactaattgcttttggccacttcacacatccaccttaaatagcagacaatatatacaaaaaaagttgcataataacaagatttaataatacatttagacttaaacctattctaaaatactaaatatcatgggttttaatttattttgtcattgtttctgttcttgttttttttttttttaaaccttcctgaggccattgttttacttctttcaatattttcttagggctaacatcattttgacacctttcagacaggtgcagtcatctttgagatccaaaagagaaaggataccttctctaaattgctaagattagaggatgtgggttacataggttcttggttgggtcacaggaccctcagtggcttcttccaaggtgattcaaacacaggactccttatcactgtctttagcactattaaaaacttatgcattctttatcaatatttcatcatacatagctaggccatgtagagatctcctctcctagggaatcagaggtgacattcaaatacttggttttcctctttggctctcagactagctgatcatttacacacactctgccgacgctgttccttgctaattgtggatgatagctaatgctgacacgttgctgcccaactctccacttgattgctctacggcacggatgctaagcagtccttctccaggtcctgaagtcctggggtgacctaacttacatgttctttagttattctttctaacataacagaaaacttttaaatagatatctaattaatacctcctaaaagaaaccacaaaagttttggtagataaatctggtagctccccatcttactaataagtagctacatttgtgaagagtgcaattgcagactccagactcagactacctgagtacaaatctcagctctgccacttagtagtgatgtgatattgagcaagttaattaactgtcctatgccttagttggcttattggtaaataggaactctctctgtgaagtggcatcctctccatagagttgttatgatgattaaatatgttaatacttaagtgattagaaaagtacctggctcatggtaaatgccatatgtgttactgtttctttaattgcctgcgtcccagggactcttttattgtcattgataaatattttagatttatagctatgtcccataatgaatcactctttctcttttgctcatcctcaaagttggagactatcatcaaactcagctgtgtgataatttaacaaagagaatttcacctttaggtgaacatgagcagggattgtacaagccaggtcctactagcaggccatagggcccagcagtcctttgcctgcagcaacctgaaaggttcatcctgggagggtgaggctggacgtgagtcttataggctggcaatatttcagcttcttttagcagttggccccgatatttgcagaattcataggagtttgggattcatatcaagtcttagagtttaagtgtcataagctgatggtcttgtatgatgtcattactcctattatgtattctggctccatgcccaggcagtatttggggatttattgatcatgcctgtgctcctcttagccacagtgctgttggttttaaagaagcaacccttagtttcagattgaagagccttggctcttacacatgtcctcagttagtccagttcctagctgttccccaagaacactttagctgttctgcttcttgagctacgggttcaggactgcatgacatatccagcactgtgctggagctgcttcatactggttaatgaaagcggaagacatgcatcacttctcaggtctccatttggggatgtcatgttggtcgcttgcaattagctatggaggaggtcttgacaccacagaaattgacatatgtcacaatcagagctttttaacctagggattttattgtcaaaaatttactagtgcaccattagtgttatgtaactctgcagttatacctaagggctttgtgtttttaccctgacacctctgcttacaagcagagtaactctgggcaggtaattctacccctctgagcatcagtttcagcatttgtgaaatagggataatccctcccacttgaaagaaactttttatgattaaataatagatacaaaagacttagaattgtgcttggcacagtgcgaaagatggacaaatgttaattctttcttaattactcaaccttttggagacttcggttctgactcacattctgccattatctgtgcatgaccttgggcaaatcatgccaccaacaacctggactcggttagttcatctttaaaaaagggagaaggcttagatcaactctgagattattaccatttttaatgtttgaaaactttgttgaaatgttgaaatcgtattaggatcctagacagttaagggaacaccctctacctgatcctgggctcggagaaaaggacaggccctttcctaggtcatggctgacactctagaacccttcttcttttcttttaaaacagagaatatggattattttagtccctggattcatcatttgtgcttacctgggtttaaactcattagattttgaactccctcctccctctgccccaaatccaaatgacacagcagactcctaaaagcttgctctagcctggccctgtcagactacattttcatcaaccaatttaaaatcttcctgatcccgctgatgagtgagaacatgcggtgttcaggggacataaacatgggaacgataaacactggggattactagatgcgggaaagagggagggggaaaaggtctgaaaaaccacctactaggtactatgcttattacctgggtgatggcctcagtcataccccacacctcagcatcccacaatatacctttgtcaccaacctgcacatgtgccctctgattctaaaataaatgtgaaaaagaaaatcttcctgataacaaaaatatgcccattcttttttctttttctttttttcaaacaattttttttattagctcaacttctggagaagaagaaatattctccatttccaatatagaaaatgttcttaaaataacattgcaagcatttatcttcataagctttctgaaactctgaacagatttcgttacacttttctctgtcggatatactacacttacagctcaattcaaaagtcagaggaaaggagtcaaatgtcttggttttgtccatcctgcatttaatgtgtgttgtgtagcacctgagcctctcagtgtgtctgttatgcattcttgcgactattattaatttttctgtgtaatgttggagcggcagcaccaggcactcggctccccacatgcattttatggaacacacattcagtgtatgtgctacagcccccgagctgcccacacccctgggcctgaggggaatggtgggggaggtgaccgccaaacattcgtgacataatttccaaaaaatgtccagaagtgctgcacattttctcccttcgtgaaaggcacatgtgcctcccaagccattgggttggtattcgttacacatataaacacaagggggtggtgtttgaaagcaggaaaaccatggaatttgcttctcaatcccagaagcaatcttttttgtagcacagtccaggcagcagtctgaggctattctttgtcgttccactgtagtcatattctgcaagactaagaaggagatagtcttgatttattgtatcaaatcggttaatttaatttttaaagacttttcttaaatctgtcccacgctctctaactctcctcttactgcccatgttcaggctctcatcatcttttattttttaccttatcaacttagttatttattaacttacataaataagtttctgttatttattaacttacataagtaagtgtttctgtttaagcatataatccactgagttttgacagtgtttatacccatgaaataaccactacaatcaagatagagagaatttctatcaccccaccaaagattctgtttcagtttgcaacccagctttccattcatccctaggcaattcttgatcttttttttctgtagatggtgagtcactttttatcacttttggtcactatggatttccatttagtgggaatccactgtatgatttgcatttctagaaatggaatcatatagcatgccctcttctctgtccagcttctttcactcagcataatgatttgaggcgcatctaagttgtatgcattcccttttgttgcagagtggtattccattgtatgaatatatcgcagtttattcattcagctgacaaaatacatttgagttgtttccagctctgggctattgtgaataaagctgcagtgagcattagagtacaactcattatgtgaagatagttttagttcctcttgggtaaattcctggtagtggaatagctgggtcgtaaaaggaggtataagtttaactttttaagagaccgtcagtttttcaaaggggttgtagtattttaattttccagcagtttgagtgtaccagtgtctccatatcctaacccagacctagtattgccaaccttttaaatttagccattcagtgttatagcttttagaatttgtctagtaggttttctggctttgaaagctccaaaataaaaataaaaacaaaagaaaataaattgagccatgctaggggatatagagtgctgtctcatgtggttttaatgtgcatttccttgtcaactggtgatgctgagcatcttttcttcttttcgagaatcttttcatatgctttttgccatttataagtttcatcttttgaagtgtctgttccaatctttagtccgttgttttattgagcttttagttttcttactattgagttggaagagttctttatatattctggattcgagtcctttgtcagatgtatgtgctatgaacattttctcccatcctgtgacttacttttttgttttcttaatgatgtctgttgaagatatatatatatatatatatatttttttttttttgcaatggggtcttgcacagatacccaagctggagtacagtggtgcaatcttggctcaatgcagccttgacatcctgggcttaagttatctcctacctctcagcctcctgagtagctggcactgcaggtgcatgccaccacgctcggctaatttttgtatttttagtagagatggtttcaccacgttgcccgggctggtctcgaactcctgagctcaagtgatcagcccatgtcgggttcccaaagtactgggattataggcatgagccaccatgccaggccctgttgaagagattttttatttttggttttcaattaaccatttatttcttttatgatttttgtcttttgtgtcctgagaaatatttgcctactacaaggtcacaaatatgttctcctgtgatttcccctaagaattttatggtttttacttgtttatttagttgatccattttaagttgatttttgggttttgtgtgaagcaaaggtatcaatactctttttttctacacagatgcccagttgtttacttttaatgtctctttaatttctgatattatttgtaccctctttctctccctatcttatccactctgtgtctctgtctctctttctctttctcttctttaaccagatagtgggttatcaatttttgttgattttaaaaaataattaaaatagcttttggctttggtgattttctccattgcttgtctgctttctattttattgacttttgccctgatgttcattacttccttccttctaattatttcgggattactttgctcttctttttctagcttcttgaggtagaacttaggtcattgattttagacctttcttcttttttaatataaacctttaaagctataaatgtccttctaatctctgcttcacctgcatctcacaagctttgatatactttacttttattatcttccagttcaaaatatttcctaatttcccttgagatttttctttgatttatggattatttagaggcaggttatttaatttccaaatagttgaaatttttgttgatatttttatttctaatttaatacttttatagtcagagaacacagcttgtatggttttaacttttaatttattgggacttattttatggctcagcatatagtttcaattaaatttttgtgaaaaaatatatattttgctgttgtgtatatcctacaaataccagttgggtttaggtggttgataatattgtttagataactgacatttttcttggattttgtgtaattgtcctatcaattgccgagagaaaggtgttataatcccttaccatggttttagactgtctctttctttgtttttactttgtgtattttgaaactctgttactaggtatatacacatttttgttatgtcttgatgatgaattgatctttacaatatgaaatgttggtccctacctttgtcaatactctttgtcttgatatctattttaactgatatgaatgtagccatttttaccctgttatatttactgtttacgtgctatatattattccagccacttactttcaactgatttatatctctgtatttaaagtacatctcttatagaaaatagttgggacttgcttttttatacatagttatagtctctgccatttaattggagtatgtagtttactaatatttaattatatttatatgattggatttagagctaccatttcattatttgttttctgtttgttccttctggtttgttttgcttattttgcttgcttgtttgttttgttctcctttttgccttttggattatttcaattttttaaaaataccattttaagttatccattggcatttttgctgtgtctcttttctctaatatgttggtggttactctaggtattgtagtatacatcattagctgttcactgtgcacctagagataatattgtaccatttcttttaaaatgtagaagtcttgccatgatatacgttcatttaccgctgtgcctgtggttataattttatatgtattgtatctatatacattataaaaccatgatacatgattatcatttttgctttaacaatcatatgtactttaaagaaattaagagaaactagattctttcatatatactctatttctgaaggtctgagtttctctctgatgtcatctcgcctcagcctgaagaaattttatttagaattttgtgtagtgcaggccaggtggtaaaacattctcttagtttttcttatctgaaagtaaggtttttatttcgccttcattattgaaagatatagagctctaagttgccggtttatttctcttggtactcattgtttctgggttccatggtttttaatgaaatatctgtagtgattcaaatgattatgctcctgtatataacaggttgctttcaagatttttcttcatttgtggttttcagaagtttgactgtaatgtgtttctctttgaatttatcctgtttggggtttactgagcttcttgaatttgtaaatttatgtctttaactaaatttggggagttttcagctattatgttttacagtaattttctgctttagttttcctctcctctcttcctttgactaaaaaacccgtatgttaggcttttcaaattgcttcacagttccacagtgctccatttattgttttcagtcttttgtttatctactttcaattggataatttatattaatgtattgtaaaatttactgactttttcctttaccatcttcagtcttaagtccatctagtgacttttaaaaaaaaattcaggtattgtactttcctgttctaaaattttcatttagttcttttttgtattttctattttttttactacttcattaattgtaagcatatttttctttgtctgactgatcattgttatgatggctgcattaaagtctttgtctgaaaattccaacatcatagttacatcaggattggtgtctgttgattctcttttcccttaggagtgggtactattttcccgactctttatatgtcacataattttggattataagctggacattgtgagtgctttgttgggttcttgttttaaaaggcaatgaatttagccagacccaactacatcctgcctgtctgtgatgctgatggcagatctcagttcagttctttaaacattagctgcaaacttctttcagttttctccagacatgcatggttcagtggtctaccagagacttgaactgagtctgtatacaagaatttagtgttttcccccaactctgactctcctcttttgccttctcccctactgttagtagccctggcatccttctccgggtttcttcccccagaaagatgatctttctgttaatattttactttatctctactgccaccaccatgactgtgctgctctcagggcaaatctgccagcaaaaagaaaaataataaaacacggagaatatagagaactgcttgccacatgcttcaagtttcacctcatctccaaaacttgcctgtctttgttcacttctctagagatctcattagttgtttctaatctgttattcagaatgtacagctgtgagttgcagcaggatcagtgtgttgagtgcatactcctctcactgcaagtgcagcccccactctttagctgaataattgcagtggtcttcctgctgtctttagtcttattttcctccaatccagctttcacttgggagccaggtgattaaaataaattctggtgctgaccttgctattgtaagattgatttctaacttcttgtagtggcatacatagcctttcattaataacttctacacacctgtgtaatgcaataaggtgccttttctcaacccagtgtgtttccacagttctggaatactcatcacctttgatttttcttactctctttcccttgcctaactccagaaactccaccgctgtccccattttgagtcagatgtcccctctgagttccctcttaatattctgtggatccccctataatgttacttagcacatcgttctattatttgctgctcagttatctgtattcccccaagaccgagctcctcaagggttgcaaatcatgccatatttctttaacttctaactcttccctcacctaatttcactgcctgatatatagtagatatacaataatttttctactgattgcattatattctcatgagtatacattttttatttctgtttctatgggtgtctgttgtgcacacacagagttcccatgaaatagaacaaaggatttggggtcatttgtcctccattcactgtgtatcagttgcggcatatttgctaaccttgtcttttaggccccctacctataggtattagacccagcatgctgtgaaatccttatgattaaagtctttacactaagaagggataaggcgatggtattactggagtatccagcaaaggcaggcgtcttctgcctttctctttttttataaattggagagttcagacattgctggggaagctcactgtctctttctctctctctctctgtctgcacgtgtgcgcatgcgtgcatgcgtgtgtgtgtgtgtgtgtgtgtgtgtgtgtgtgtgtgtgtgtgtgtgtgtgtgtgaatgctgatgactctccgggaataagccagcactggggatgaggtgatagattcagaacccatcgatctgtcatagcatgtcatctactaaggaatctggaaagcattctcttcctttacaccatttcttatttatcagaaaggattcattgacttttacattgtacggaacatggattttcacaagaactgatacgttgctccttggtatcaacctttcagagcgggagctactgaatgtttaacccacatcctttctttcaaaacaaatgagcttctgtctccatagaacttttaaactttcttgtgttacctagtgtcttagaatagtgcctcagcttcagctccaacttaaagaagaaaagaacaaatggtttcatttctagttatgcaaataaactgctcattgtaaaatcatttataaatttatttatttagcaaatatttatcttgtatctgctgcatgccatgctttgagcatacaaccaggaagatagatatgatcactgcttcatgaacatttagtctagcgttactgaaaaatatatagaagcactttttaaaaagcatcccagaatctcaatacgcagacataaccactgttcacttctttctgaatattttttttttggcatttttgcccttcggatttcaggcaccagcacttcgtctattttcatttcagtatcttcaacttctttgtctattttcattttggtatctcttgcttctttgtccttcatttcccccatgaggcaaatctccaattgctgagcatctaatctttaacttatgtaatgtttggctctggcccgaaagaaaaaaaacttttcagaatgtgaattttaatcccaaggagcttgttctactttatatgtgtgagattctgaattttccacacctacgaaagactaattaagttatagaggtatttcccactgttaaattaaattaacagacttgctcattttatagtttaatgaggaggtgttaaaagttgggctgtaccttatttataatggcaaaaacgtgataaatatctaaatgcccatcaataagagactagttaaataaataatgtatccatagaatggaatactattaatgagttaaaatagtttgttgacataaaaagaaaactaatatagatggaaagatagctacaacaaattagtggctgaaaaagcagattataacatagattacaatattttgttttcatttatgtaaaattggatgcacatgtctgtacatgcatagcaagccatttgtatgcattcagtcaatctatttcttcaacaactattgtgtaagtgatgctctgtaaatacattgtgatagttgcccatgtcatggggcaaaatcagataatacatataaattgtatcatgcatatttgagggggaacatatttgacttactgaaagtacctttttttctcatctccagaataatgaactacaaagcaggttggactatttaacagaaacccaggccaagactgaagtggaaaccagagagataggagtgggctgtgatcttctacccaggtatttaggaatttcctgatttttttttttattcaaattcctctttggctgaagaaaatactttactaggctgttcttagcagaattgcattcttcctatcacaaatatttctgcaaagccgagtggtggctgctgagaggcttgactggtttctgtaggaacaggggcattgtgcagggtggaggggtcagcaaaggagagacctggggaagccatttagagagagatgggccctgtcagtgagtgaatgcatttgttccttccttccttccttcattcattcaactaatgctcttagtaccttccctgtgccagacagttatgacacagagaggagtgagatttggttcctgccccagagtacagtctggagggagagacaggtatgtaggtagacatatataacggtgtgagaggggcatccgaggtgctttagtgatatacaagagggaggatctaaaccttgaacaaaagtcatctgttcctcagtactgtaacagggtattgtcaagcactggatccagttcataaatacctgatctgcttgagtcatcggcagatatgtgataactataacctggtttgttcagttacattcctgagctagaggactgacctgttcattgttaagctgcttccatgcttgcgtctcttcctggtgacattagagcctgtaacacagtaacctgcctctgataactaactcaccattcccgggtgctcacaactgtgcctggcctcaagaggacataaaacaagtttacagcaaagatgctaatgacatgtgacttgtgatttaggtaatcaaagtcacaaaatgcctggtatcgtgtgtgcaggagggtggattcttgtgtgaacaggggcacttgtgtgtgctttgctggacatagtagtctagaaaaatgtcgaatcctggaatcttgagtggttacagctggtgggaagtagtgacgagccgatcaccaagctggggtgtggaatacctggttcttgtcctaccagccagcagcaggatgccttcagacaggttcttcactggggcctcggtttctcaacttctaaagtcagtgatttgactaggtaactgctcaggcctctaccagctctaacattgtacagtaaggcctcctttccttactttattaatttttatttattactggtattgtcatttttgttaattaaaatgaatcacttgccattctcaaagaatttaccaaaagcggcattaggttctttctttgacagtgtcctcaattacattgcttgccttctagtaaaaaggcattttttatcagtccaatataattaatagaaaatgttgaatatatatatatgtatatatatgtgtatatatatatatgtatatatatatatatatatatacatatatatacatatatatagactccggatctcatcatattcagatatattttcatatatgaaaatataaccaaaaagaacgatcaattgtgtacagagacctttttgaaatttaaataatttggccgtttcccccctttttgtatttttcaaaagccaagtggcctagtccactctaattgcccacataataaatcttgtttggctaagacgggtacaaaactatgtctgaaaccaataaattgtttgttttctaattcccgcattttggcttaaaacaagcttttcaatttgtatgcccaagtatagcctgaagcaaacttttatggctaagttatgaaaccacaaagcggttttcataatggaagtgctgacagacccttaacttatggccatggtgaacttggaagccacttcagtatctaaaagcagcttttccataaatgtaacatttggtttccccccggatccatcttagcagtttaactacctaggtcaatcagcagaggaaatgaaaactacatatccgtgtttccgaaaaggcagaataatatttcattcgtttcctcgcaaatatttattaagtgcctactatgtgaaaggcgccagggaagtctgggtggggaggagcccagaatctttcggtaactcagggcagtggccttccacctgcgcttcttggaactgccttactctgagctggggctcctggagaggcttcgggatgcccggggggatgaggagggttagtgagcggctggaccgtgggacccttcttcctccccaaaacaactgagaaagtcagcttttagtttgttttgtctgttggattccaagtaagattctgtttgaataaatagctctatgggcaaaaacaaattggaactcccggtctagttaatccccatgttttatggatgccagaactggggctcagagagatcaagtgattcactggaagccacatagccagaattagaaccaggccttcttgagtcttggtgcagtacatgtgtagtttgaaaatatgtaataaatagagagctactaaatggtggtgtgtatgttctaacaaaattcctggttcatacttggacttcaaatttgcatctaactaataaaagattccatggtattgtccagaatgttttttagatttttgtttctagaatgttttagaccaatacaagcattgaattaagcctgagttatgcagaagcgttttgttctttgtccctattcttctcctacaaggaattcaccagtgtggaacagtcagggaggctcaggctgtccagttccctgcccagccagctgctagctgagctcagccttgggcaagttacttcatctctctaaagcttcaactctttcatctttaaactaagaatgaagaggataatatcaaacctcattgggttgctttgaagattaaataaaaatgtgtacataaagcatttagagactgggcatggtgggtcacacctgtattgccagcactttgggaggccaaggcgggaggatcccttgaagctaggagttcaagaccagcctaagccacatagcaggaccttatctctaccaaaaaaaaaaaaaaaaaaaaagaaaagaaataaaaaataggccaggcatggtggctcatacctgtaatcctagcactttgggaggccaaggcagtggattgcctgagctccagagttcaagatcagcctgggcaacttgatgaaaccctgtctctactaaaatacaaaaaattagccgggtgtggtggtgtgcacctgtaatcccagctactcaggaggctgagacaggagaatagcttgaacccgggaggcagaggttgcagtgagccaagatcatgcccctgcactccagcctgggcctgggcaacagaatgagaccccgtctcaaataaataaaaataaaaatgaaagcattttagcatggtaactggaccagagttaagcacttaataactaatagctattactattaatattaactaaacccaaactctgattttctatgtagaacactatataaaatacaaaaaaatctgagtatgctaagatgatttcattaactttttattggtggtaatcattgattttatgaaatggattgatagcctgatcaagtatatagtacttcagtatgcattgggctcttcagttaaactctctagacaccccgtctagacactgtgtaaaactctgggaggcccagtgattgataaggtctctgtcagctaagacctgagagtggcccctgcgtgctgtaggcatggggcacttgtcttattgtagaatagcatggcctctcctactcactcatctgtacaactgcaagtgttacatgctgtgctactgctaatagcatttttagagctgctctacttttttttttgtcttgtgtgaaaaaaaaattgcatttagttgccgggtgtggtgtctcacacctgtaatcccagtactttgggaggccgaggcgggcggatcacctgaggttgggagtttgagaccagcctgaccaacatggagaaaccccgtctctactaaaaataagaaattagccaggtgtggtgacacatgcctgtaatcccagctactcaggaagctgaggcaggagaatcacttgaacccaagaggtggaggttgtgttgagctgagatcgcaccattgtactccatcctgggcaacaagagtgaaactccgtctcaaaaaaaaatgcatttagttgatgctcaataaacatttgttgggtgaataagtgaaagatacataccaaatgaagaacataggcaggtgatcagtattatcacatgatttatttatttaataaaggccttggatgaagtcattcctgcttatgtttcacctctttgtgtgtgtgtgtgtgtgtgtgtgtgtgtgtgtgtttctctctctctctctctctgtctcctcactagaatatgagctccatgagggcagggattttcatctctttcactaattgcattctccctgggacctccttagagcaatgcttggcacatactaggcactcaatatttgttgaatggagccatctccctgtagcatttgacaatccttcctaagaagaaaggaaggattcctcagcctatttcctacccttgcaggacttttctctcctggttctccacctntctccctggtctgtccttctccagcttctctgatggcttcttttcctcctccaagaccctcccatggtagtccacatggctctatcttggttccggtactttctgcaaagattacatcaagtctcacagcttcacctctcccctctgtggctgagccacagaagtgtgaacctttctcttgaatacaagtccttgttccccacagccttctgggcacactcccagctggtgtctgcttggtcttcatacttgccgtttcatggccgagtgcgccatctcnttcttcaaagtctctcctcttaggagtgagtaagaatactggcttggaagttagacctgggtttgggtcctgagtccgcctcctgctttatctgcagctttggcaaattcctaccctccttgattctcatcttgaaaaggatgattttggtggcaatccctttggaagcttgttgagaggattaagggaagtaacaggcatagaatgtccagtggaagtgccccgccttttcatatttctgtggctgcagccactgctttcccagctacctaaactcagtatattgcagtcacttctgagtcagagaattattttgctccttgactcactcactcatactgtgctgttcttttccttcatgacttgactccttctttcccattcctcttgctgccagcctgcctcagactgtctaatctactcagtaccatctctctgcctcactttctcctcctcaaattcttcccctccttcatctaatctttgttttccataaatttctagtgaccaaggatctcttcataaagagagagggaaagggaaggggtgagaggggactcactgtgggttcaggagttcacacacacacacacacacacacacacacacaaatgtatgtgtgtatttaaagactcaggagtttagtttgaaaactttgatatatgttaattaaagccattgagaacaagtgcaggtcatctagccttcatttacaaagaaaaatgaaaaaacaaaaacgaaaggaaaagtgacttttctttcttctgccctgtagtgaaacttggtttccagcaaaccagcaaacttggttttcatcaattatgtcttaataggtgcaatatgatgaaaaatattccccatggtcataagtgctcagcacgtagtaagtgctttaaaatgcttatattttcgtatttcttttgcaaagaccagaacacaaagtagctttttgtcaaagctttatttgctgattctgctattgttttccccaggggaactgcccctttattgattaataaaaggttaacaatagcctaaatgtgttaaggcaaatggttgggtttcagttttgtggttgaggttatttgtgttcttgaaatcctgttgtttcctagtgatcaacaaaataaaataccccacttcttttttaaaagatcgggatatgagagcctgtttttgaacctagaaggttcacctttataaatatttctgcattttatgggctttcaggatattgtcattggagactgtttctgttatgcagaattttcacaggagttggcacaaatagccatctggcttctgcccctggcattccactaaactgcctggtcaggtcagtggggcctcctggatcaccaggtcccatggattgctctctgtggcaggtgacactgggaccacttacttcttgaaactcctccaacctttggtttcctttgtaattcntatgtggggtaatagctctgtggctggcttctgtgagctgctggattcatggagatgacggagatgtggctttcacccttaaagaaattatacctagcagtggacacaaatgtgtagaccaacaagtgcaataagatgctatagaggcttggcgtggtggctcacgcctgtaatcccagcactttgggaggccgagttgggcggatcatttgaggccaggngttcaagaccagactggcccacccagtgaaactccgtctctactaaaaatacaaaaattaaccaggtggtcatggcacgcgcctgtaatcccagctacttgggaggctgaggcaggagaattgcttgagcctgggaggcagaggttgcattgagctgagatcgtgccactgcactccagcctgggcaaganagagagatttggtctcaaaaaaaaaaagctatggaggtgtcagaagcctgtataatagtgatgttcaaggtgtatatggggattgggtggagaatatggagaatctcctgggggagacatgcaaagtttaaaatacaccccctgccatgctttttaatacatcctctatcacctggtgaatgactggatgtgggaagttaggggaaagggattcgactcttaggcttcatatacacattttgtcatcgtgttggttgggataaggaatgtagctatttgaaagaacccacagatcttggtggcttagcatggtaaagattaatttcccatgtcagtttaaggccgtttggtataggtttcactccacacagtctttcaggaacccaggaattcctccatctagcaaccctgcctgagctttggagtcctcctggattctccacttgtatgctctacataaaagggaagagagagagagagcgtgggggattatgtagatttttatgggttaaacctggaagtagtagaagtcatttctgcctgtttagtcacatggcccacctaatggcaagagaagctgggaaatgtagttgagttgtgtgtccaggagaaaaaagaaatgggatgtcttagtcacctaatcctgttaactataactctcaaatgtctccctaaaatctccccgccacttcccatcaagtgcttccgtcagaattcaagttgtcatgatctctctttcacctcctgaagagcaagaattttctaactgacctgccttcagaataatccttccctagtcaaccctcgatagtaccagaggaatcttgctagaataaaaatatgagcagatcatggccctccttaaaaacctgctgtagttccctgtccccttctgaactccttagccagggacatgggacccttctccaccaggcctcatcttctgccactctccattgtgaactctttgttccagtcgttccaaaggagcacatggtttgcagttccacatccacaaactgtgtgctcacccatctctgccttacacatactgccccttcttcctggagttcccatccccgctttgcccgcttgatgagtgctaggcatccttcaagattcaccttctctgtgtgaatttctagatgtgaatttcctggtggtgctaaattgttctgccctcaattttcccatcatgtgttcatgctcattttgttcaggtcatggcgggaagggaggcttgagagttaaatgaagggactgttgtggatgtttgggcaactttaagggaaataaacaagggacagtggcaggctgtggaactagcaacagtggaagctgttaccacccttgcctgaggaggcaggggagaaagctggggaagataacaagttggggagctgtagctatgggccctggtagagggatgccgccaactaccaagctgcagcctggctgggaaaggaaaaatgtcccgacctctttgtcctctcattccctgatcccctgctaccaccttgcagtaggccaaaaggaactgaatttgaagggcaaatggatgctgacttttccgggccacagagtagggtggagaaggggcagagtagggctgaatggcaaaagaagaatgcccagcacagctgttatgtctctgttatagttcctaacacagtacatgaaaattttttatgtacatatctttcccaccaggtgacaagtcccttgaatgcatgtttcatatttttctgaaccatggatgcctagtacaacctttacaggttgttaaaaataacttttttatttttaacctgtcgtagtctgttctggctgccataacaaagtaccataaactagttagcttataaacaacagaaatttttttctcacagttctgaaggctgggatgtctaagaccaaggtgccagcagatccagtgtttggcaaggacttgctttctggttcatgtatagtgtcttcttgctatgtcctcacatagcagaagggatgatgatgaatatttctggggcctctctttttttttttgagatggaatttagctcttgttgcccaggctggagtgcagtggcatgaacttggcttactgcaacctctgcctcccgggttcaagcagttcttctgcctcagcctcctgagtagctgggattacaggcatgtgccatcatgcccagctaattttgtatttttagtagagacagagtttctccatgttggtcaggctggtcacgaactcccgacttcaggtgatccccctgcctcggccttccaaagtgctgggattacaggcgtgagccaccacgctgggcctggggcctctctcataaggccactaatcccattcatgagggctccaccctcatgacctaatcacctcccaaagtccccacctcctaatacatcaccttaggggttaggatttcaaaatatgaatttgggaaaacgtaaagtccattgcagggcctgtttgtaatatttaagtgaaatattaagctgcattattgtctttttatttttaaacacttaaacaccattttctagagttgtcttaccatgtgaagcatatggggggttttgttttgtttcattttcctgacctgcattttctcatttctcagccaaacaggcaggactcgtgaaattgtgatgccttctaggaactacaccccatacacaagagtcctggagttaaccatgaagaaaactctgacttaggcactcagaggcatacactttttacagatggacaaaagctctggaaccctgtggcttcaaatcctttgggaagggtgactgttgtttcccctacacacagtgtaagccggaatgggaatcgctgaggctctgatccacttctaagacaggaaggaaagtgaaggcagagtgagcaggtaagagagggatatacaaggtcacatttcagacacccactcggcataccctgccgtactgcatcatcatttgttttctttgtagacactgaaatcctatcaggaggattccttcacaatgtattttatttgctagactttggttgggagggaaaaggacattaatttgaagtttcatgttattcatgccaggattgtttgatagagcatgaaggttttgtttacccataaaagtattagaggcagcgtttctctgatacagagaggcctgtccacaagaagcatgggcacccagccaaacttgaacctggaagggagggttcccggcctgcaggtgctctttcctcttggtcccaagcatctgtgcagggtcgtgggagccacactgagagacttgtgtgggccagacaagcttcattctgatgcgctagtcccttggtttaatttgtgccttatgctttcattggaccagctgaaatcactgtatttattcaactagtgatttttttttctttctcactttaacttaaagagaattttatatgtcttggaaatttaataatttagtgttctcagtatcaattggtgtttttgttaaacgaatgaatcatctgttcatgcatgctctactttgatattataacctatgtcacatgtgtttaataaataccatatattttgttctactaatgttgtctctctgtttcatccatgaccatgtagaaggggcagagagcagatcaggctctggaatgagtgtcaaagtcaaatcacatgatcttccagccagtacaattcatacaagcatctgtaaaccataagattgactgtgtgtgtcnggggagggtggggggcctatctgtctttttaattgctgaactttagttaatacaccatgtggaaaaagcaagataccttaatgatcacaaagtacaaaaatagattttacttttaaacctttcctcaaacctcccaccccttactgtctccacttccaaaaaaccaaagaaataaaaaagtaagaaagcaaagcaactcagttagataaatcactgtgagtcagaatcatgctaagaggaaaatgtgcatttgggagccacatttgtatttaaacactgtccgtgggaccttgggcgagtcgtcaaggctctctgaatattagtttcatcctttaaaaacctcggattatcacacctacttgataggctgacgtgagtgccacatgaggtcattcccacatagggagtgggcactgctaggcacacaggcagtgattgctgtcattctggaggttttagagcactgctgattgctngttgagtctcaccactggaggtattctagcagcaaaaaaccgtgttctgtggcagccaccaagaaggagcacttagagaaaaagctgtccttaggaccaggagatagggaagctggactcagagagaggcagagggttctgggagcccatccccctgaagaaactggtctggaagcagtttctaagtgaaatgcaatgacttaaaaaatgtcaattttaatgagaccaaggtagaaatgaaaactactctgccaatacttccacattcacttctttctctctctcttaaaacaagcaaggaaaagaaaaacttagtaattttaaatttaaaggataccagggaccattctgcagctcgggcctttgtattttaaaatatatcttcaacatatggaaaattctaaacatgatttgaactactcaagaagactattaaagagagttcctaaattgtacagactgaaaccgaaagaagctgagagataatccttccagatcctttgtcaacattgactctagtgccccccaaccctccatctaaaggactgacattcatcaacctcttcatgagcaggggtattacataaaattgggagaatgaactctaacatttcatagtaaatttatctcactgaaatggaaagcagcagtgtatgtaaagggtttttaaaaaataaaacaacatcctataatcttccaattaatatcttcattccagaccttccagaattttaaaacacacccgctccattttgtttttaaaataaatataaccctatactgagaagtggaatcatgtgatttttaagaacgtgggaacactcgagtcagctatctgagcttagtcactagtgcgcatgtgggtaagtcacaaccctgtctgagggcctgtaaaattggaactgtgagagttctttcctaatggggttggtgtgaagagtaaatgagttaatgcctgcatggttcttagaatagtgcttggcacatgataagcacttaatatatgctacctattaacattacatacttttgtagccactttttgcttactttatatatatataaatatatatatacacacactttatatagtttgctttatatatatactttatatatagtaagtttgcttactttatatatatacatataatatatatttttgcttattttatatgtatatatactttatatatgcatataatatatatgtatacaatatacataatatatattatacacatatatgtatacaatatacacatatattatacacatatatgtatacaatatacacatatatattatataatatatgtgtacaatatacacatatatattatatataatatatgtgtacaatatacacatatatattatatataatatatgtgtacaatatacacatatatattatatataatatgtgtgtacaatatacacatatatataatatgtgtgtacaatatacacatatatataatatgtgtgtacaatatacacatatatatgtgtgtacaatatacacatatatatgtgtgtacaatatacacatatatatgtgtgtacaatatacacatatatatgtgtgtacaatatacacatatatataatatgtgtgtacaatatacacatatatataatatgtgtgtacaatatacacatatataatatgtgtgtacaatatacacatatatataatatgtgtgtacaatatacacatatatataatatgtgtgtacaatatacacatatatataatatgtgtgtacaatatacacatatataatatgtgtgtacaatatacacatatataatatgtgtgtacaatatacacatatatataatatgtgtgtacaatatacacatatataatatgtgtgtacaatatacacatatataatatgtgtgtacaatatacacatatataatatgtgtgtacaatatacacatatataatatgtgtgtacaatatacacatatataatgtgtgtacaatatacacatatataaatgtgtgtacaatatacacatatataaatgtgtgtacaatatacacatatataatatgtgtgtacaatatacacatatatatgtgtgtacaatatacacatatatatgtgtgtacaatatacacatatatatgtgtgtacaatatacacatatatatgtgtgtacaatatacacatatatatgtgtgtacaatatacacatatatatgtgtgtacaatatacacatatatatgtgtgtacaatatacacatatattatgtgtgtacaatatacacatatattatgtgtgtacaatatacacatatataatatgtgtgtacaatatacacatatatataatatgtgtgtacaatatacacatatatataatatgtgtgtacaatatacacatataatataaaatatatgtgtgtacaatatacacatatatattatataaaatatatatgtgtacaatgtacacctatatactctatatgtgtacaatgtacacctatatactctatatgtgtacaatgtacacctatatactctatatgtgtacaatgtacacctatatatactctatatgtgtacaatgtgcacatatatactctatatgtgtacaatgtgcacatatatactctatatgtgtacaatgtgcacatatatactctatatgtgtacaatgtgcacatatatactctatagagtatatatatatactctatgtatattctatagaatatatatgtgtacaatgtacatatatattctatagaatatatgtgtagaatatacacatacattctatagaatatatgtgttcaatgtacacctacagaatatatgtgttcaatgtacacctacagaatatatgtgttcaatgtacacatacagaatatatgtgttcaatgtacacatacagaatatatgtgtacaatgtacacatacagaatatatgtgtacaatgtacacatacagaatatatgtgtacaatgtacacatatataatatatatgtgcacaatatacacatatataatatatgtgtacaatatacacatatatatgtataatatacacatatattatatataatatgtgtatattatacatatatgtgtatagtatacacatatatattatataatatgtgtatagtatacacatatatgtataatatacacatatatatgtataatatacacatatatatgtataatatacacatatgtattatatataatatgtgtatattatatacatgtatgttatatataatatgtgtatataattgtatataatggatataatatatactatatgtatataatataccaatagtgtatataatatatacgtatatatattatatatagtatataatatatacgtatatatattatatgcgtatatattatatacacctgtgtaatatatgcatatgttatatacgcatatgtaatatatgcatatattatatacgcgtatgtaatatatacatatatatacgtgtatataatatatcatattatatattgtatacgtacataatatatcatatataatatacgtatatatcatatataatatacatatatatatcatacattatataatatacgtatataatatatcatatattatataatataagtatatcgtatatcatatatcatatattatatatgtatataatatatcatacatgtatatattatatacgtatattatatatcatacatgtatatattatatacgtatatatcatatataatatatgatatatacgtatataatatatacatgtatgatatatgatatacgtatatcatatattatatattatatacgtatatcatatataatatatactatatcatatatatgatatagtatatattatataatatattatatataatatattcacatgcatatatatgtgtatatatataaagtatatatacatataaagtaagcaaaaagtatacatatgtattatatatagaaatatatacatatacataaagtaagcaaaaagtgtatatatactatatatataatctacaccattgcttcttataggtaattggattccattttttgatgtcccataatttatttgacccatcccttagtgttggaatcttggatgttgtcttcacttttcttcagcagtcctctgatgaaccatcttgtccacacgtttttgcacacttgactgattattttctcaggatcagttcctagaggaattgtctggtcaaaaggtgtgcacacttttggtgcctatggtccaatacggcctatggaaatttgaattcattgaaattctcactaacaggctgagaatgtgacttcctgactcttttgccaacatgaggaatgagaaacagagtgtacaacatggctttctttaggcagacctgccccccaaacaggtggtgaacaaagttccttcagcatattgcctgtggatatcagaactcagggacatgcaggtgtgagctgcgggcctggaggtgtccctagggcccagagagtgcctgggcagccgacgggaaactggatggactcagaaggagcaagtgtccctcaggatccaggaatcaaagaaggcctgccgcttagtgagccagcatcaagagcctgtcactcaggccacatgcctaagatgcggtttgactctgagtggggcatgccccctatttcagggatagcctgggagagaggatcaacatttgggaagtgcttggagggtgcaccaaccaaggctgacccctgagctggtccatgtgtccactgtgagcacccactttcttcccagtgaatgccatctgcctactccaggaactctagggtggtcaccagggcaaggagtgggggtgataggaatgggtcctggctcaagtcccactgggccatggtgctcttcttgacggccagactgagagggccagttcagttcacccagcacatgccaggtgcttggaagacaaagaaatgcacctcgagacccttgctgtctccaaaatcttttccagcaagtccaggccctcctgatctttcccatctctgaatcccaggggaacttattttcagccccttctttattcttacatctcatgaccaatctttgtgtacatttattatctctccagtgacataaactcctcaggggcagtgtcccataaggggcacactagtcatttggagggaagccattgtaaaccttgataagcatgaagaaatctacaaatgaggagtattccagaaaaagcctcggctttggggaagtaaataataccaggagttactgagctggacacagcacacatacactgagtctttacaacagtcctgcctggaagatgttatcaccaccatttcatggataaggaaattgaaactcaaaaagatgtgaaaattgtctgaaaccactcagacctgtctgatttcagaacacaggtgggaggcctggagtcagtcccaggtctgccattaaatcacaatacctccttggtcaggtcactacagcactctgcagctccgtgccccaggatgcagctttttcgatgaagtaaatggaattgcatcccccacccaggcttgctgcacagatcatggcatagcattgacaaatttcctagcagttcatcagagatatgccaataattgatacctgctactattactagtaattaccgggaagccagtattgcaccaagaatatttgcaaacccaaggatttcttcttattggacacagagattgaatgaatgctagcgaatggaattgtgcagaagacaaacaggagtgagggaaatgctactggataagcaggaggttaaataaactgtatctccttttgtttagatgtgaatttaagaataatctattttactttgtcagggaaggaaaggcctaaaagggagactaaagatgagttgctaaaaaagagagaacagaagcaaagagaccagaaggtgagtgctgctaaagcttggggtaattcgttaggcaggattagataactaatacatggtgtgaaaaatatcgttgcattttgtttttgcatgcaaatatctaattgttttagcactatttgttgaaaagactacccattttccactgaattgcccttgtaccattgttgaaaataaattggccatatatgcataaatctatttctatactctctatactgttatattgggatctagttgcttatcttgacactaatactatgctgtcttgtttgctgtagctttatcatcggccatgaagtcaggtagcacaggctctctaattatatttttctaagttgattgggctattctaggtcctttgcatttctatatgaattttacagtctgtcaatttccacaaaagcgctattgggattttccttgggactgcattgaatagacaggtcaccaaggataacatcaagaccttgctgtgtcaggccagctcctagcaacactgcagcccaagttgggagcactaggttggctcctggatgtcagtgactgctcttctcttccttagctggaaaggtactgggaaaaacctccatagtgtattttggtaaaggtatagtataatctttgtgggattccgaacaaaatattataagaaacattcatttgtgcccaagggccataaacttggtgtaatctgaatgcaataaattataaataaatggcaaacagttcttgatggttttctcttaatttttcaagttttaacatagagcgtttacaggattcaccttcctgatttagggatgggaggggggttgagaaataattagtaggcaattttttggccctgggacttttcttgtaaatgttttctttggcagccatactcttgagaacaggaagttactctcttgttacagatttaagacttttctgagccaaataacagaaagctggattagttctgaaatgaagtggggggaaaaaaaacaactctaggctcttgctggagattaatgacatcttacaaatattttaattctcccctttcctcttaacttgctacctcctaaacaaaacacactcagactgaaaaaaaaaaaaaaacaaaaaacttaactgatcactttgtagcccaaccttaaaataaaatatctttatggtgcccacaaatttatgtaaacatttttggggtgttaaagggaaggaaaatagggctgtcttaagtcgatcctttttttgttacaaaatccccaatatgaaatttagagcataaaatgtagttgtaaagatgctaatttttctatgataatcacacagattcataattttctttgatctttttaaaatggcttttaaaaatagataaaagtgtttaatcaagctttgaaaactatgcctatatgttgtttgagatggttgcaaacaattctttagaaattgttccaaatgacaggattatatcctttgactagagcatctctgactataaaacaaaggaattatttcctccaaaaagactgagtcctcacagaagggcatgctgaggtagaaataaaaaaaaattaaatttttacacttgattctaaaaaaaagttgtaatcttaatgaagttcataatctggaggaacattaattccgtgaattatctgagaactatttgtgaggattgtttttaaaattgctttaaatgtaaaagtttttattttttgcaaggattcttaaaacacagaaggccttataaaaactttgagattgagaagtaaagaacgctttcctgtaacaagtatatatcttctactagtaatctaggaagtttctatggtattaattgcagcctcagaaaataaaagagttggtctaagtgttttatttgcacttgcctcctgcacccaaattcaaatgccctggtacccaagaagtttgcctatagttgagaagggtaggataatagggccagtagctgatgggagcaggggaggatgcttccctgggctataagaacatgcctatcctaaagtcactcaaattcctaagtctgaaaaacactgtgctgccaaacacacccatctgtaatttgaatgtggccaaagacccacaatttgccacccttgacttgcattatctaatgtttttctttctgtatattatgaagaggatatttattccttcatactaactttcttcagtctgcttgaggtgatgcccttccacatcattcataatagtttcttgtcttctactattattgacaacttcacttttttaaccttataaacaattttaaattactcggagctgtcatccattagatataaaaattaaatggagcccaggaattctaggtgatgggaaacattatccagggctgtaagacatgcacaactatgggagtccagcaaaggctgataagcctggagctccagcaatgttgggtgagcatttatttaaagggagctacttgcttcctggtttgactgcataccaaatatatcttctcaacatttatgagcttaaatagatgcagatgttgccagagagtgtattgtaacattcatcatcctagaatcatataatttaagtgttgagaggcatcttggacttcggttcaatactctcattttaagcaggaggaagctgaggttcagaagagttaactgacttgccacaaagttagtggtccacaaaccctgccccataaaaacattgttgagggttgacaaattttactaccaccacctccgttctctcatctggattgctttaattgtcctatacactatgcttgactattatctcctcccaattttcaagaagaaaattaatgagaatttttttttcctgaataattcttctttatatttcgtgggcatcccttacttctctccatctccccactgttgatgattttcagagctgtgttctttctcatgtaagatggaaattaaaggtgaccagacactgattttggccaggtctagtgagaggagaggggttagtttgttttctctaactctagcctgctgctgatcactagtttatttatttcatggcctctgatggacatcagactccaaatagtgagagccatggtgtgctgacactgtagcagaaatcagttctttccatccactaaaaagacaactacctccttggtgaaacctgaaatgatcttatgaaatctcatcctgtagtgactttgcaaattacctcactcctccttttctgttttctcataaatatatgtgcagactgtctttcctcaaccacaaaggaagtgtaaacatagtttatctgatgttttatgaattaaataatttctatagccagacttatatgatgtacttgatgttttatgaaaaatcttcagtgaggcccatttaagtgtaggacagtctgccctccagcatagaatttgaaccaattctaagcaaagtttggctgttatatcctcctactttcctgccctacatactctccaaatcctagagatgagtactctggggtcttcctattatcctaaactcactgatgtaatagtctgtctggtgtgttcttcttctcagattactcaaaattctctccattttctccctttccctcctgaacaaatttcactctttgggtttaggtcatcatctcagctaggctgttatgaagaagcattttggaactaaataatactcacgtgtaaatgactaatagatcatttatgttctcaaaggaagatctttgttcaccatataatcttcttattggtggaatttcactcaatgtgtcaaagggaaggaaaataagtcaaggagaggggaaggtatttttaatcttgtttaagattttatgtcttaaactgagaggaggggccttagctacaatgtctatatagtctgtgtcaaagaccgtgtgctctttcaaggatttttttcccagtttgtgagttttttcatatttaaaaatcttacaaagttttattattcaatcacaattcagttggtcacatatctaaccagcaatcttcattaaatttattaaaaagtaaacttacatgaaatttcagagtaccaaacatttaataatttaaaaaactatgtcttcccacactatcaagatcataaaacacagtggtggcctgaaatgggacattcgtcactaaaaaacacttcagccatgtgacggtattaacagaaaagggttcttttccaccaacttgaacctcacttggctgagattttctcaccacagtctttgtatttttttttcccatgggcaactgcccccttgattaatcccatttcccttagtcctagtttttccaggcagctgagcaaacaaagatgcaggcagccattttaacgtgcttcctccctcaagccctctgggatgggccgtctgttcatcctgttcataaaccaacggcctgaatgggcttggagaaagcagcaaggatcttctgtcaggattaattttaataggccatagtctgtcacccgggaaccatagcccaggcaaatggctttaaattactatttgctgataaaaagggagatatgagctgaaaatttggttcctcatttaaaacaacttggataactaatgcaagaatttacttttagtgtggagtgcaggtactttacagcctaaacccttgggtagctgaggaaaatcttttgttgccatgggatcacagtgaaatataaagaggggaaatgtggcagtttgtagaagtatagaattttagagctggaagggaaataaaaaatgtatctgtgacttcctaaggacttacgtttagagctttatatttctgatttctgtgcagagaaacgcgattcctcttattgccccttctacttttttgtctccctctttaccaattcctttctctttcctttttttcactgtttttctcatacccaattccagttccttgttccttcccttggttcctcatccctcaccagccaggctcctgtcatttctctgtgaagctctgcactggggggcacatgaggtagcgtggtgaatgtagcccctaggcaaacaagtcaggaggccctagctcttgtctcttcccttgtaaagtgtgagaaggcagtttgggggactgactggaagggatggttttgtaaaatgacacactgatgtcagccattattgttcaataaagtcctctgtgtaccattcataagtaatttttttattagctatggccattgttttggtttgtttaaaaattcagaatgtggctgggcatggaggcttacatctgtcatctcagcactttgggaggccaagatgggaggatcatatgagcccaggagttccagaccagccctgggcaatatagccagaccccatctctccacacacacacacacacacacacacacacacacaaatcagctgggcatggtggtgcacaccagtagtcccagctacttgggaggttgaagcaggagtaacctttgagcccaggagtttgagactgcagtgagctatgattgtgccactgcacttcagcctgggtgacagagggagactctttctcaaaaaagagaaaaaaatcagtgtgttccatactcaaatggatgcttccaagaaaaatcatggaagaaaatagaatttgcttcatacttctttatgacccttggttcccatctcttcctttccagccagctcccctcaactctcatagatcatatcacttgttcatggagaaaatgttctccacattcctttacaaacatgactgataccataaaaaatgtttggtgcaagttctgtaatctttcttaaatagcccagcctgggcacttgagcaagaaggctggtggctaaaattaaacaaaacataacaaaaccaaaaacaggctgggcgcgatggctcacgcctgtaatcccagcactctgggaggatgaggcgggcagatcccttgaggccaggagtttaagaccagcctggccaacatggcaaaaacctgtctctactaaaaatacaaaagattagccaggggtggtggtgcgcgcctatagtcctagctactcgggaggctgaggcaggagaatcgcttaaacccgggaagtggaggttgcagtgagccaagatcatgccactgcactccagactgggtgacagagcaagactacatctcgaaagaaaaaaaaatgcaaagaacaaaaacaaaacccaagtgtcaatgaagatgttgagcaacttcattgctgatagagtgcaaaatggtatagatactttgtaaacaatttggtagattcttagaaacattcatttaccctatgacctagttatcccactcccaagtgaaatggaagcttatgttcatgcaaaaacctatacacaaggtttatagtgacttgattcataatcagcaataacttaaagcaaataaatacctttcaactgtttaatgtataagtaaactcctacaatggactactatacccatagaatacaacactacttagcaataaaaaggatcaggttactgatacctgcagtggcataaatgaatctcaaaaccattatgctaagagaaagaaggcagattcaaaaggctactgtatgattctacttatatgacattctggaaaaggcaaaactctaggacagaagacaaaccagtagttgccagggataggggttcagtggagaggctgactacattttggggggcatgatagaactgttctatatcatgattatggtggtcatcacaaaactgtatgcatttgtcaaaactcagacctgtacactaaaaagggggaattttactacatgtaaactatatcaataaatctgacaaagaaaagaaatatacagtattaatttgcatgttattcattttaaaataaatggtattgttctgcaacttgcttttttcacttaaccttaagttttggagattaaaccttgttgaaatctgtagatttagttccttcattttaattgacgtagttttcaatttttgctaccactataaacaatgtggcaatgaatgttctgacacacgtcttctttagtacatacaccgagtttccttaggaaggctagtacataaatgctgtgtgttggattgcagagtaggcacgtcttccagtttactagatgtgactgcatatctttcctaagtgtttctgccagttcagtctctgtaacacatgagctcctgtttctccaatcagaaagagtttggaatttttaagatttttttactttgcatttccctgaagttgaggatccttttttaaagcatgttttctggtttttccagtttcctcttctgtgaactgttcgtatttttcctttttttttttctgacttgttttgcttattgatgtataagaattctttttgtaaagtgtgagtttttgtattctggatgccagcttgctgtttatatgtataatagcctttacccttctacactacagaagtttttgccttaatgtagttaatttacaaattatttcctgtaaagtttgtaaaatgtgtcttaagaaatccttcctaaacttgtgatcattgaaatgtttttctgtaaatattatttttcaattttaaatagtagtttgttaattcctctggaattaatcctcatgtctattggaagtaggaaactatttatattaatactttttcccatatacacaaccaatctctctagcactatttatgaaaattcactctttcctcactaatcttaaatctcaaatcaagttcccatatatgcatgggtctatttcggtgttctctattttgttccattggtctatttgctgcaacaattatataaaattaataaaatgtaattaaaaggccaggcacacagtagggccaaagcaaaagctagcttcccccactcctcagtcagctctctaaccctaaagtctggtcatcagtgaagtcttggtttttctaaaagaatgatgctgtttggctcccttgttggtgatctttattcccactgacttcatctggtccaaatctctggccagcctctcctttaaattcccttttggtactagctccccactaatcatcaatctgctgcctgcatacccccaacttggcccagtgtcactatggccaagtctaggcatagaggctggacatgcttctgcattgccccataacacccccaccccctcattctccagcaatccccatgtggcggtcgggccatttctcatgctgagaggcccaacaagtgtgaagttgaacactttcagtctttgtacattgacactaatgtatcccacattagtaatccaagtgaaggaagcaaaattaaatttcttaaagaaaaaaaggctgggtgtggtggctcatgcctgtaatctcagcagtttgggaggctgaggcgggcagatcgcttgaacctaggagttcaagtctagcatcggcaacatggcaaaaccctgtccctacaaaaaaattaaaaaaaaatttagcggggcgtgggacacacacctgtagtcccagctacgtgggagggaggctgaggtgggaggattgtttgagccaagaaggctgaggttacagtgtgccgacattataccactgcactccagcctgtgcaacagagcaagacccgtctcaaaaaagaaaaaaaaggtcagaatttaagagaggaagagagggtcgaaggagggaaatacaaattcagttttggacaggttgagactgagaaacctttgagacattcaggtggtaaggcctttaccctgactctaattctagtcccagagcaaaaccccaaaagactcctgtgcttaaaagcctggagagattggtaccttggaatttatggtaagagagagttttaagagggagaaactgctcaacagggtcagatgctgtgagaaggggaaggactaagacatattccttgaatctgacagccatgaagggatccatggtgcttgcaagatggtgaagaaatggagtcagagaatgtggacaattcttttaggacgcgtatctctgaaaaaagaaggcaggtggaagctgggggcagcttttaactgctttattggggtataactgacgtgctatacactggacatatttaaagtatacagcgcaataagttttttttaattttctctttttatctctagaagtaagttttgacttatcaaatgattacacccatataaccatcaccgcaattaaggtattgagcatccccgtcactcccaaatgtttcctcctgcccctttgtcatccttcctcccagcctctccctgacaccccacaacatccgataatcactgatctgctttctatcactatagatgcgttcgtattttttacaattttatataaatggagtcatacggtgtgtaattttttcctggcctctttctcagtatactcgagattcatcagagttgttgcatgtaccagagtattcgatcatatgcacagactacaacgtgtttatccacttacctactaatggattgtgtcaagttttgggctattacaaataaagctgcaatgacacttatgtgcaagcctttctattaatatatgctttcatttacctgtttctcttaggtaaatacctagcagaagaatggctgggtcaaacggtatattttaagaaactgccaaactggtttccaaagaggttgtactattttgcattcccattagcagtgtatcaaagttccagttgctctacatcctttacaacacttggaatggtcagtctttctggtaggcatgtactaatatctcattgtgattttattatttattttttcttggatatagagtcttgctatggtgcccaggctggtcttgaacttctgggctgaagcaatccttccacctcagcctcctgagtagatgagattacaggcatgagccaccatgcccagcttctccatgtatttttaatttgcattttcctaatggctaataacactggtcttctttcatgtgcttatttttcacttatatatcttctttggtaaactgtcttttcaaatcttttattccctaatctggaaagtggtgcccatcacttctaccatatttattagaagtgagtcagttaagtccagtcaacattccatgggagaggattacattggagtgggacactgggggccatcctagaggctgtctaccacgtgtggcttcccatttcttttagggtaaaatccaaactccatatcctggtctacaaagccctgctagatctagccccagccttccacattgcttttttttgttatttgaacatgctaagctccttctccttttacggccttagtatcttctcttgcctctacttgggatgtttttccatcagattttcccacagttgatcatttgtcatttgaagtcccagcttaaaagttacctcctcagaaaacccaacctcagtcacccaatcaaagtagtctaccagtcactccttatcaaatcactctgtactaattctctatgtgactcttagtactgatagaataaaagtttcaatgtaacaggaaatttctttacctcattcatcgttatatcaccaaatcctagaatagcgtttcacttgtgatagacgctcaataaatatttacttactgaacaaatgaatgagatctccaaagaagcaagaacagatgggatccatagtatagctgaagggattaaccttggataaagttcctgtgactactgctgtttaataaacgaccccaaatttagaaaaggcatagtgaagatgtctctgctccacaatgtctgaggcttcaatttggatgtcgtgaaggctggaagtgactggacagttggggctgaaattatccaaagttttgctcactcacatgtctggtggttgatgctacctgttggctgaaacttcagcttgggatgatagccaaaacatctacgcaaatgcagacttcttcatggcttgcttgctgagttccaagagtaagcacttcaagaaagctaggtagaagttgcatcaccttttgtcatctagactagaaaaatcacttttgctctagttataagcacgcccagattcaaggatagagaagaataaccccatttcttgacaggaggagtgttaaactcacatagcaagaagaacacatttaggatgggaaatattgttgctgccattctggtcaactccaactatatcatggccagttttgtggccattcatgccccaacaatgacaatcaaagcaagaaaacagaggagaacagcctggaaattctaaacatttatgtttatcagttttacaattgattgtcagtttttatcttcaactaggtaaggacaagtggaaatcattcccaggtcttgtttttgttcagtgtccttgtgtagcttcgtggcagtgggatgtctataggtcatcttggcagcacctcacgtgactaatgaaattttcctttcccttaattctgttttgaattttccttcctttcaaacgcagccaaatttattagtttactctgagagcaacattcaggagattaatccaagtaccactggaaaagtgattcatctttttaatgagcactgaaaaacacaaacaaaaaaaccccaaaacacttgcccagattcatttttataacggatgggctctttgacaggcaactggaattctttagcagagattagctgtctgtggtttgtgggctccatttcctttcaagtgtttggttcagctgcaaacaggtataacctgtagcactcattgtttctctctttagtcttcatttctccattgttaaatttctccattttatatcttcttctctagacactgctgtgaaaatttgtgtcctagatatttattttttgtttcataaattataaaagaatactttgcctattttccttttgaagtgtaaataggctgcaagtagtctgcttctgttgtagagtgatgttttccacttgccatgcttcctggttactgacaaaattagacagtttgtgcttggatgctggtgggaatttagatctgtattatgatatcttgaagccctaagccatactgtataaaagattctatcccaaaccactgaaaaatctacacagtaatgatgattaattatataaaaagcttaagatttgcatataagaaacatttcattaagagaaagaggaatatgggggaaaggtagagaaaaaaatatgagagaaggagattgtgtcaattactacatgctatgttcctgagaggagacagaaaaagtacaattatagctccctcacagaaaggactttacaattttgttaggaaaggaaaaagaaatctcgatgcataacacaattagagaagtataatatgcttcatgcagtgaggttccaactttaactaagccctataattgtgctgaaaagaaagagaagtttggtttggaataacatgggaaggttcagggaggaggtgagacttcagccaagacttacaattggcaaggggagaagagatagccttccacaaaagggtaacagaagggggcaaaattctgaggcctaaaagaaaggcatccttgccttggggacacctgtggcctacaatcagcacatggggagttcactactgtgggagaaataaaggcctccagctggggtccaggggtggggtgagggaggcttgcggggtgcttatcactgtaaaccaaaaataaaatttgaaggtccgccctcaaccgtctgaatggacttcctcctgtagtccagggtcctccaaatttaacctaaaagactggcttaggccatgatgggaagctgaggtcagacatgcctcattatgcccttctttcttttagaatccaggaaaagctacacagcatttaatatcaacacatataccttgagtctgataagaaacacaacttactttctctgaagcctgctaactggaggcttcatctgcatgataaaatttcggtctccacaagttcttatgctaacctagacattcctttaaatcaattaccaatcagaaaaaaacttaaatttacctataacttgggagcccatcttgccccacacccgctctgctttgagttgtcccacctttgtggattaagccaatgtttatcttaaatgtatttgattgatgtctcatgtctccctaaaatgtataaaaccaagctgtgcaccaaccaccttaggcacgtgttctcaggatctcctgagggctgtgtcacgggccatggtcactcatatttggcacagaatacatctcttcaacattttacggagtcttttttttttttttttgtcagtaccacagacaaccacctgactcgaggaccttacctatttctcattcagccaatgctgcagcacgttattaacgtccttgaaagcaagtcttatacagagaaaacttattttgatatattaatgaatctgatcagaatggaccagattggggggatagataaatggttgcaattgtgctccctggaatagctttggagtttacctagatcttctgtctctttaggacagagctgcttgtgtttatatagcatcttacacaggattgagacaacttcaatttcctatatcaaaaaatcgggggagggcggtgggttatgggggtgttcaaacctcccaagtgacatctgctgtgactgcatgtcttcctactctttccactgggatgcacctctggtagctgaactataacgagaaggtaaaagctgtgtccaatacctattaagctgccttcttctcaacagctggggaggtggcgggggtgggggggggcggagggaagtcttttcaacagttttacacatttggaaataggcctaaagtgaagaaggggattttcaaattggtgtgttggaaaaggggctgggcttttgagtttgaaatctggtgctgtcacttactggttttgtgccctgggaatatttatttcagttttcatgcctctgtttttctataggcaaagtagaaaattcgaaaaggtcctcaacgagtttgtacagctgctcccactccctcatcacctcttgtgggcctttggaaatgtatgttggaggagacattttggattgttgcaatgacttgggagtgccatagcacctagcaggcagaagccagaaacaccaaatgtcttaacaatgcttgaggcggtgctacaaatgaagtccttctccaaatgcattgagccccaagaaaaatcgctgattctgaggaaccttccaactttaacaatttcaggacgtccctaagctgagctaggaggcaccacgcacaggccggaggcaccacgcacaggccagagtctcccaaatcctgtcccgcactctctcccaccttattaatggccagctcatctttcaagtttcgacttgaaccacttctcagagatatcttcccaggtgcccatcccaacgttactattatatcataatttgattctccctccccccatccccccgccaactctgtaaaccccaagtataacacaggacgttgctatttgttgactgacacatagtgcttggtgaggtcacgctggcgctgaatactttttgtataaaccgacgaacagctgatgaccgcatgaatgctcacacaaggggaaagggcgccaagccaaggagccggcgtcatccgacgtaacttccgccctttaacgctcctgcggacgcccccttctcccagtccgtgtttgtttccggaatttcaataaagctcgattcggctcgaagaagaccccgttcttccgggaaaatggcgactcccgctcgtgccccggagtcaccgccgtccgcggatccggcgctagtagcggggcctgccgaggaagccgagtgcccgccgccgcgccagcctcagcccgcgcagaatgtgctcgctgccccgcggcttcgagccccaagctcccgaggacttggcgcagcggagtttggtggagctgcgggaaatgttgaagcgccaggagagacttttgcgcaacgagtaagctggggtcccgcggagtctccgccaggctccttcagctcgagctccctgggcgctcccctcccctcccgcactctgttcccttccctggaaggtgactttgactcagtcacattcgcttcagtcctacgggcgagtggacggagggcttgctgcggcagagccgtgcctcttcctggccaggcacgtatgcctgcgaggatagctcggattgaacggctacctggcgttgcagggagttagtagcccctggtcggttttatttacccggggactgtggtggttccatgagtctgctttctaaacccttttgtcgcccgcacccctaacccataacagattgtcagcttcatctctggattctaagcttacaggaaccgtaggaaatgggaagagtgggatatgaagaggggtttattaggccgggaaagttcgaccctcattcagctggctggttgaacggattttagcaagggagccacgtaataaaagtgattttgttttttaggcagctttgttcagcagcttgttgcaaaagatggtttgaaggaataaaaagcagaagacagtagaaggatattttcagagagacttcccacgagacacttgtaagaaagtgagctaggaagggattgggagaacttttaagcatggactaatttaaatgcagttgacagagatggctgaagtttccaatctatatggaagaccactagcaaaaataggaaaattcagggagaggaatagatccaaggttgattttacttagggtgtgcagagttgagaggagagcaggacagacatttggttaatcgaaaaccaaacacttaaaagctggagaagtagtcatgaggctcaagaaagagagaaccctggaaaaatacagaaaacaggaatttcagctgtagagtgttgttaatagttgaaattgtggggatgaatgtagtgtcaaaaagaacagaggacttaaggtgtaattttttctttccatttattgtatagttaaagaaaagggaatcagaaaaggaactctgtcatccagcaaaagggacaaataaataattggttgggatcaagacatgtgttttgaccttgtgagaataggttttgaatgtatagcagtgaattaactttttggtctcaggactccgttatactttaagaattattgacatcccaaagagctattttatgtgttgtatctagcgaaatgtatttacttatcagaaatacgtctgaagtctttaaaacataagcatacacaagcacacattctattctagaacaatgatgtcatcacatgccatgtagcctctggaaaactccactgtacccatgcgagaaaatgagagggaaataatatcttagtattattatgaaagtagttttgacctaataggcccatccccacactccaccccatccccaaattttggagattgcactttaatgactgctggttcttggaatgtcttatgtgattattatatgcttaaaatacttttgctgaaattctaatttgctgagacaaatgaggcatatattccctattcttcctgcattcccttgttttttgggctatttggataatgaccattttaattgttttattcttgttttggggcagttagaaatcagatatttgacttaaaaatcagcttttctttctttgaagataatgccttgcctttttaatgttatatctcaagttaaaaaaatggctgtaatgtaatagtattcttttccatttgacagaaaattcatttgcaaattgcccgacaaaggtaaaaagatctttgactcttttgccaaactgaaagctgccattgcagaatgtgaagaagttagaagaaaaagtgaactgtttaaccctgttagtttagactgtaagctaaggcaaaaagcaattgcagaagttgatgtgggtacagataaggcccagaattctgacccgatacttgatacttcatcactagttcctggatgttcctctgtagataacatcaagtcatctcaaacctcacaaaaccagggacttggacgtcctactcttgaaggtgatgaagagacttcagaggttgagtacacagtgaataagggcccagcttccagcaatagagacagggtaccaccttcatctgaagctagtgagcatcacccgcggcatcgtgtttcaagtcaagcggaagatacttccagcagctttgacaacctgtttattgacaggttacagaggatcaccattgcggaccaaggtgaacaacagtcagaagaaaacgcaagtactaagaacttgacaggcctttccagtgggactgagaagaaacctcattacatggaagtgctagaaatgcgagccaaaaacccagtgccccagctgcgtaaatttaaaaccaatgtgtaagtaccctcggaaacaggcctgtaacaggaacgtgatatttgttaaactcaaaaatttacgagaaactgggtgtggtggtgcttgcctgtagtcccaggctactcaggaggctgaggtgggaagacagctttgagtccaggagttgtagaccagcttgggcaatataataagaccttttctcttaaataagtcaggagaatgctctaagttccgtgggctttgtatgagaactacttgtagttaggaaataacatgttgtggcaacactgagaccagcctggccggagtagaagattcatgttgaaaaatatttagttttgaaaccaaataatcgacaaggtcttttaaagcacatgggggagtgttaaattttaggatgcttagccagtatttcataataaacacagagttggagagaatttattatgacttctttttttcagaaccattttttagtgtacagctttgattagtgtactatcaaagtgtactctctttgattagtctgtgaactaagggtaaagcaattgcaggagctgatgggctttccagcagaaattatttgcatgctcactgtatgtaagcaagcagcaggtgttgtggggacacaattaagtcaagattcttaaaactcctttgccttttttgatgttaaatctcaagtttaaaaacatggctgtaatgtatacatgtgtaatgtaatacaataccatgttcttcaaggagtttaagagctacatgaggacccaaggtttacacacttggaaaagagttaagctacataataataacagtttcagggggaaggaagctgagaagaggtttgaaaaactgtgaaaatagattcaggcaggataggcaaaaactctgcttatcagttccttgccataaatttgtttctgaaatttcaggaaaagtaaaatctttttgaaaataattgctatttacttgcagcaaatgtaacattcaactcaggtaactggtaccttcttcctatattgtatttacaagtatgtaacatcaaagttaaatcactactacctttctttgaaaaacagaaaacctctagtgaaaagtatctaaaacatgcttcttttttgttagactttaattctaccccagcattcattttaacctcaaaacattttatttctgctgtatagaaaatcaggattatactacattaacgtgatcaagtactctcttgtgtacagtggggtatctttcttcacttccaggatgacattttagaaaactagaaccatcatctagtcaataaataaaacaaagaatacattaatcccagttctgtattatggtcatttagctgggagtgggagagaggtaagggaatagtgaagagggctaccaagaattcaggaagtttaagagacagggagcctcctgtataagttagaggagaacaggaaaggcagggctttgaggagtccttaggccatagacaggtagggattgagagggttccgtgtgagaggtggcttggaggttggaaggtggggtcaggtagtgtcctttgggtcctttctgctcttccttctgcatactcttctggcttcatgtatcacctggatgctggaggctgacccctgtgcacctctatcccagatcttcccagaactttaggtttgcatagccaattaaccatgaaacttgatcacttgggtgttcccaggtacctcagcttaatgatgtacaaagtggaactgcagtttctttccaaggtgatttccatattccctaatagtgccaccaccttctcggttttcttcccctaaggtatcttcgatttttctcatctccatatctgctagccatgaagacctacttatttctttgatcttcatctctataattgttcttcatcttctgtcgaagtgaagactctcatctctctcgggctgtaattgtggccccttctacctctagtcttaactaccagtctatctccactgctgccagagtgaaatttgtaagatggaaatccgaacttgttacggagaactcttcattgcagtctgggcctaggctacttcccagccctctttctcgctgtcttttctgtgtagccagaaaagctgagtctgtctaccttctgtactttctctcactccccttgctgggatgcacttctctccttatttacatgggtaagcagttattattccaagactgttcaaagcttttttgaaacttttcttagcctccctgtctcccactagaactggccatttccttatgttccaatgtatcttgttgagatatctatcacagtatctctggtattgtattgcactgaaactttacatgtgtatttctttctactgggcaataagcccttttgcaaatgttctttgaataaatgaaaaaaaaaaaaaaaactccagatgaaatacaaggtttgaataaggaaggaaaaggcaaagagcctgtatgcacacaaacacacccctatttgttagagcaatgaatactggtaaattacttactgttacctttggaggagaattaattgctaaggtaaaggccatttgtgtgaatgttttaaatgtgtctacaaataaaataatctgattgtataacacaagttttcctttcatcaggttaccttttcgacaaaatgattcatctagtcattgccagaagagtgggtctcctatttcctcagaagagcggcggcgcagggataagcagcatcttgatgacatcacagcagctcggcttctaccacttcaccatatgcccacgcagctgctctccatagaagaatccttggcacttcagaaacagcagaaacagaattatgaggtatttagagtattttttttcttgtctgtttgttgggtgctgcttacataagctagaatttactccaggttcaaggaggaaggaatggaatagaggggattaggtgcttccatgagctcagatctatgccactagttttcagagagtcacaaagttgctagaactgcaggaagtagctagagatgatcacagctaccttcaacattaaagtggtgatttgcctggagatgtggggagacttgtagaatttcatgtcttaaagctcatttacctgcctgttcctgttaggatagtagtagcatcgcatctctccctttcaccttgtaaaactcatgtgacagcttctcagtggcggactcaaacccagaccccttgttagagaatgaggagaatgtagttcccaggcttccatcttctgcagtacaggggagggcatagaaggagtgggaggataatgttgtgtagccagcagacagtgagacactgctttagagcataatctgcaggcccatgtgaagagagaaatatctcctgcttttggcagcttaatcaattttgcatagcactttgtttccatgtgttttgcattgaacttcaaacatgtatgttgagagtttgtatacagaataatgggatgggagaaaataagtgtgaaggaccataggggaacagaaaagtttagaagtatttagtaataattttagcctccaggagaacagtatcctgtctcacttcctaggtattgattagctagattttagtcaggtactagtgcaccaactagtataacaccagactgttcaggagttcgagaccagcgtgggcaacatagctagactccatctttaccaaaaaattagccgggcattggggcatgcaactgtggttccagctacctgtggggctgaggtaggaggattgcttgagctcaggaggtcgaggctgcagtgagccgcagtcacaccactgcactctgtatagcctgggtgacagagtgagaccctgtctcaaaaaaaaaaacaacaaaacaggctgttaatctgctttggcttttcataaaagccttggcatggattggcattatcaaggtgctctttttgaaaaaaaccatttttctttcagtgcattaaaatgactgtctagttatggctgtagcattgaggaagtgtttactgtctctgagctcttaaatgcctgtcctaagatatttttaggttgaattaaacccttcatctttaaattgtttttttttagcagagaagttgtagtggtaatagctcccacttttactgacccatattcatggcttgaagaggaggacatcaagaagttcaagaaagcatgagaaaagggaagaactgaattaggaatgacattgccacctaccatcagttggtggtaaagtccttgggagtttttaagtacattgccagtgtctgaaatttacttggactttttattggatactagttgctgtaggactttatttggagaggaatagtcagctttttagtattaatttcttgattttcattttgccattgaaatgtaattcccaagtctggaagtcatgattgtaattagggaagaaggtcctgtcagttgtagaaatctagacagcattagtccttctttttttttttttttttttttttttttttttttttttttgagacggagtcttgttctgtcacccaggctggagttcagtggcgcagtctcagctcactgcaagctccgcctcccgggttcacgccattcttgttcattcttgtgaacccgggaacacgccgggttcacaggcacccgccaccacgcccggctaattttttgtatatttagtagagacggggattcatcgtgttagccaggatggtctcgatctcctgacctcgtgatccgcctgcctcagcttcccaaagtgctgggattacaggcgtgagccactgcaccgggccccagcattagtcatttttgacatttgataggtcaaattgttatgtgagtgtgtatacatgtgcatgtgcccccatatttaacgcatctgtatttataagtattgtagtgctaagctcattactcagtttcttatatagaggagtgtatttcagtgcaatgttgtatattaatggaggtcagtaacttcaactgtagcaggctggtggctgtcagaagcattacccagttgtgtctgatagggcacagccatcaggcttgtattgcccaagggagcactcagtgaggtgtcagtgtccctcttattgctgattctaggtaacttcccattgaaaaattgtaaggaagagatgtgaacgtgtaactttgtgctttgctctttgttttaaaggagatgcaagcaaagctcgcagcgcaaaaattagctgaaagactgaatattaaaatgcggagttataatccagaaggggagtcttcagggagataccgagaagtaagggatgaagatgacgattggtcctctgatgaattctgaagataatctcctaaatcactgacgttgagatgtcatcatcttacatcagactttctaactagtatcaagatcagtgtcagatattgttgagggaagtaattttataaagttacacaaaggtagttataaaaaaagcccagtttgtctttcagaaggtgactttcatgtgcttgaaaagtttaatatttgaatattgtgtttaaccacatggtattaaaattttgcaatatattgtgtattggtctgatattttagtatatagtagaacatactttttttttctttaagccaaatgaaaagaggtaactttgcttttttcctttttcttacctatcaaatagcatttattacatgtctttcagtgaaatacttagttgttccaggcacctaaaatcaattaggaagacatagttcccttcttttttgggtaatgaagggagcagtctaaagaattgtatgcatgtttgcatggggttattgagacattggatgtgaaatacctaggaagacatgtatggagaatgcttaacaaatgctcttctcctttttctgtcttcccttaggaagaacgttatctctcttctgattaggaaggacttcccttttgagtagatgctggaaagtggaggttttttttgttggtttgtttgtttggttttgtgtttttttttgagatggggtcttgctctgtcgcccaggctggagtgcagtggcaggatctcggctcactgcaatctaggtggaggtctttttaaataacctcatgttacttcaggcaaatctggtacaggagaagcccaagctaactgagctgggtgaaggcttgtgcatcacctggcttgagttccttgctgtcacagatgataggttcatgtacacaacattaatgtttgataaggaaagcattttttttttgttaaaattgaattgtcagtactttacttttttccccccaaataggtatatatagactgcagaagcttcagtcccatatataaacgttcatgtcattttagaggattatatggttgtctccagagaaattaacttacattatcaaaaaattctttgtctaatatattggagtctttaaaagtgttgaagaataaaatattaattagaacaacttcaaatgctaaggtgatgttttaccgggacttaattaaatacaactttttcctttcgaaaaagactgttcacatttgcttccaggtgtaattattgctttcattccttacccccctcaagcaaatgtgaaaagtatactgacctaagattctcattagttttagttcttaaaacgaatagtaaatgatttcacagcgtaaaatttgatgttatttctggaagctggatgatatggaagagttcatgtgcctggacacacagttccctgtaatcctgccatctagggagataaactctgttaacattttgatgttgtgtttttgcttatttttctatgcatagttatgcatttatattctcaaaaatgaaatcataatgtacattgctttgtagtctgctctatatattgtcaatatgttcccatattaaatattttgctttttagacagctgtaggatattttatttcatgggtataccataactttaagatttatttcctattcagcaatttgattatgtattataatgtaatctgtaaatagtgatatgattaacatcttaatcacatccatagaaaatgacttatttccagaagataccgctctaaaaatgaaattgttaggtgaaagtgtttttgagaatttttatatatattactcactgcagagatcatgttcatttacattcccattagcaatatatccaatgctcagaattgaaaattactacttaaaatctttgcaaattgaataattacagaaaagggctacatttaaaatttgtatttgtttttcttacttagtgaaggttgtgttttttttcatattcattggccatgctatattcattcttttgagaattgctcattcatattttttctgttgcttgcttggagaatttgctctttttttggcatataagttcttaagaatgtccgtcctttgtcatatattgtaactttttttagccttatttgtcatttaacatagtttgtggtatttcagtatagaagttgttttctttaggagtctacctttgtgtatgtgcttgaaagtatttttgtaatccaagaatggataaatgtccttattttcttctagtattttcttatttcacttttacacctatctttaaaaggaatttaaattttgtttatatacattaactaaatcagtacaagtttggggtgaaaaggaaatttttaatccatctcaaatgtatttggttatattatataaggtagggatttgattttatttcgaagaatttaccaattggttcagtatgtgaaaccaccatttcccctctgattagtaatgctatttttatagaatattaaattcttatgtgtcttttgtgtcttaggccaatttctgggccttctgggttttttctacactgtcaataattatcgctttaattggtgttaatatttggtagtacacaggttctcccttgttcttttaaattttgtgaaatataacttacaaataagtacttaaaacagagcttaatgggtaaagcaacagctgtgtaatcacaaactagatgcagaggaggtcttgccagcactccaaaatctctgtgtgtcccctcttgacactcactgtttcccccagagctaactatcctgacgtatggtaattctccctctgtccttttaagaattattttaccagttatgtgtataacaatatggtttacattttgctcacttttgacttatataaaaatagaataatact

SEQ ID NO: 76 - DNA, 20 bp, Artificial Sequence
  Synthetic - Human GRINL1A (rs4774281) forward primer
caggtcccatggattgctct

SEQ ID NO: 77 - DNA, 20 bp, Artificial Sequence
  Synthetic - Human GRINL1A (rs4774281) reverse primer
cacagaagccagccacagag

SEQ ID NO: 78 - DNA, 29 bp, Artificial Sequence
  Synthetic - Human GRINL1A (rs4774281) reference probe
ccccacatatgaattacaaaggaaaccaa

SEQ ID NO: 79 - DNA, 28 bp, Artificial Sequence
  Synthetic - Human GRINL1A (rs4774281) variant probe
ccccacatacgaattacaaaggaaacca

SEQ ID NO: 80 - DNA, 19 bp, Artificial Sequence
  Synthetic - Human GRINL1A (rs8037000) forward primer
cactttgggaggccgagtt

SEQ ID NO: 81 - DNA, 27 bp, Artificial Sequence
  Synthetic - Human GRINL1A (rs8037000) reverse primer
atgaccacctggttaatttttgtattt

SEQ ID NO: 82 - DNA, 17 bp, Artificial Sequence
  Synthetic - Human GRINL1A (rs8037000) reference probe
  misc_feature (17)..(17): 3'-attached MGBNFQ (minor groove binding nonfluorescent quencher)
tcttgaacccctggcct

SEQ ID NO: 83 - DNA, 18 bp, Artificial Sequence
  Synthetic - Human GRINL1A (rs8037000) variant probe
  misc_feature (18)..(18): 3'-attached MGBNFQ (minor groove binding nonfluorescent quencher)
gtcttgaactcctggcct

SEQ ID NO: 84 - DNA, 23 bp, Artificial Sequence
  Synthetic - Human GRINL1A (rs6493943) forward primer
cagaggttgcattgagctgagat

SEQ ID NO: 85 - DNA, 28 bp, Artificial Sequence
  Synthetic - Human GRINL1A (rs6493943) reverse primer
tattatacaggcttctgacacctccata

SEQ ID NO: 86 - DNA, 21 bp, Artificial Sequence
  Synthetic - Human GRINL1A (rs6493943) reference probe
  misc_feature (21)..(21): 3'-attached MGBNFQ (minor groove binding nonfluorescent quencher)
caaatctctctctcttgccca

SEQ ID NO: 87 - DNA, 21 bp, Artificial Sequence
  Synthetic - Human GRINL1A (rs6493943) variant probe
  misc_feature (21)..(21): 3'-attached MGBNFQ (minor groove binding nonfluorescent quencher)
caaatctctctttcttgccca

SEQ ID NO: 88 - DNA, 20 bp, Artificial Sequence
  Synthetic - Human GRINL1A (rs4774282) forward primer
catagggagtgggcactgct

SEQ ID NO: 89 - DNA, 20 bp, Artificial Sequence
  Synthetic - Human GRINL1A (rs4774282) reverse primer
gtgctccttcttggtggctg

SEQ ID NO: 90 - DNA, 26 bp, Artificial Sequence
  Synthetic - Human GRINL1A (rs4774282) reference probe
ctgctgattgctggttgagtctcacc

SEQ ID NO: 91 - DNA, 25 bp, Artificial Sequence
  Synthetic - Human GRINL1A (rs4774282) variant probe
tgctgattgctcgttgagtctcacc

SEQ ID NO: 92 - DNA, 23 bp, Artificial Sequence
  Synthetic - Human GRINL1A (SNP2) forward primer
tcctacccttgcaggacttttct

SEQ ID NO: 93 - DNA, 21 bp, Artificial Sequence
  Synthetic - Human GRINL1A (SNP2) reverse primer
tggaggaggaaaagaagccat

SEQ ID NO: 94 - DNA, 18 bp, Artificial Sequence
  Synthetic - Human GRINL1A (SNP2) reference probe
  misc_feature (18)..(18): 3'-attached MGBNFQ (minor groove binding nonfluorescent quencher)
ttctccacctatctccct

SEQ ID NO: 95 - DNA, 18 bp, Artificial Sequence
  Synthetic - Human GRINL1A (SNP2) variant probe
  misc_feature (18)..(18): 3'-attached MGBNFQ (minor groove binding nonfluorescent quencher)
ttctccacctgtctccct

SEQ ID NO: 96 - DNA, 27 bp, Artificial Sequence
  Synthetic - Human GRINL1A (SNP12) forward primer
acaattcatacaagcatctgtaaacca

SEQ ID NO: 97 - DNA, 20 bp, Artificial Sequence
  Synthetic - Human GRINL1A (SNP12) reverse primer
aaagacagataggcccccca

SEQ ID NO: 98 - DNA, 15 bp, Artificial Sequence
  Synthetic - Human GRINL1A (SNP12) reference probe
  misc_feature (15)..(15): 3'-attached MGBNFQ (minor groove binding nonfluorescent quencher)
ctcccccgacacaca

SEQ ID NO: 99 - DNA, 16 bp, Artificial Sequence
  Synthetic - Human GRINL1A (SNP12) variant probe
  misc_feature (16)..(16): 3'-attached MGBNFQ (minor groove binding nonfluorescent quencher)
cctcccctgacacaca

SEQ ID NO: 100 - DNA, 43 bp, Artificial Sequence
  Synthetic - Human TEKT5 mutation primer
cagtagcttggctgcaggctccagtgctggaaggaatcggctg

SEQ ID NO: 101 - DNA, 47 bp, Artificial Sequence
  Synthetic - Human GRINL1A (SNP2) mutation primer
cttttctctcctggttctccacctatctccctggtctgtccttctcc

SEQ ID NO: 102 - DNA, 46 bp, Artificial Sequence
  Synthetic - Human GRINL1A (rs4774281) mutation primer
cctttggtttcctttgtaattcgtatgtggggtaatagctctgtgg

SEQ ID NO: 103 - DNA, 41 bp, Artificial Sequence
  Synthetic - Human GRINL1A (rs8037000) mutation primer
gcggatcatttgaggccaggggttcaagaccagactggccc

SEQ ID NO: 104 - DNA, 49 bp, Artificial Sequence
  Synthetic - Human GRINL1A (rs6493943) mutation primer
gcactccagcctgggcaagagagagagatttggtctcaaaaaaaaaaag

SEQ ID NO: 105 - DNA, 45 bp, Artificial Sequence
  Synthetic - Human GRINL1A (SNP12) mutation primer
ccataagattgactgtgtgtgtcgggggagggtggggggcctatc

SEQ ID NO: 106 - DNA, 46 bp, Artificial Sequence
  Synthetic - Human GRINL1A (rs4774282) mutation primer
ggttttagagcactgctgattgctggttgagtctcaccactggagg

SEQ ID NO: 107 - DNA, 43 bp, Artificial Sequence; identical to SEQ ID NO: 100
  Synthetic - Human TEKT5 flanking primer

SEQ ID NO: 108 - DNA, 47 bp, Artificial Sequence
  Synthetic - Human GRINL1A (SNP2) flanking primer
ggagaaggacagaccagggagataggtggagaaccaggagagaaaag

SEQ ID NO: 109 - DNA, 46 bp, Artificial Sequence
  Synthetic - Human GRINL1A (rs4774281) flanking primer
ccacagagctattaccccacatacgaattacaaaggaaaccaaagg

SEQ ID NO: 110 - DNA, 41 bp, Artificial Sequence
  Synthetic - Human GRINL1A (rs8037000) flanking primer
gggccagtctggtcttgaacccctggcctcaaatgatccgc

SEQ ID NO: 111 - DNA, 49 bp, Artificial Sequence
  Synthetic - Human GRINL1A (rs6493943) flanking primer
ctttttttttttgagaccaaatctctctctcttgcccaggctggagtgc

SEQ ID NO: 112 - DNA, 45 bp, Artificial Sequence
  Synthetic - Human GRINL1A (SNP12) flanking primer
gataggccccccaccctcccccgacacacacagtcaatcttatgg

SEQ ID NO: 113 - DNA, 46 bp, Artificial Sequence
  Synthetic - Human GRINL1A (rs4774282) flanking primer
cctccagtggtgagactcaaccagcaatcagcagtgctctaaaacc

What is claimed is:

1. A method comprising the steps of
(a) assaying a sample from an individual with Type 2 diabetes and
(b) detecting a reference or a variant allele at one or more polymorphic loci of SEQ ID NOs: 1-12, 63, and/or 69-75.

2. The method according to claim 1, wherein said polymorphic loci are at nucleotide position 87,712 of SEQ ID NOs: 1, 73 and/or 75, nucleotide position 87,992 of SEQ ID NOs: 1, 2 and/or 75, nucleotide position 89,441 of SEQ ID NOs: 1, 69 and/or 75, nucleotide position 89,662 of SEQ ID NOs: 1, 70 and/or 75, nucleotide position 89,853 of SEQ ID NOs: 1, 71 and/or 75, nucleotide position 93,598 of SEQ ID NOs: 1, 74 and/or 75, and nucleotide position 94,074 of SEQ ID NOs: 1, 72 and/or 75.

3. The method according to claim 1, wherein said reference allele at the polymorphic locus at nucleotide position 87,712 is “A” and said variant allele at the polymorphic locus is “G”, wherein said reference allele at the polymorphic locus at nucleotide position 87,992 is “T” and said variant allele at the polymorphic locus is “C”, wherein said reference allele at the polymorphic locus at nucleotide position 89,441 is “A” and said variant allele at the polymorphic locus is “G”, wherein said reference allele at the polymorphic locus at nucleotide position 89,662 is “G” and said variant allele at the polymorphic locus is “A”, wherein said reference allele at the polymorphic locus at nucleotide position 89,853 is “G” and said variant allele at the polymorphic locus is “A”, wherein said reference allele at the polymorphic locus at nucleotide position 93,598 is “G” and said variant allele at the polymorphic locus is “A”, and wherein said reference allele at the polymorphic locus at nucleotide position 94,074 is “G” and said variant allele at the polymorphic locus is “C”.

4. The method of claim 1, wherein the step of assaying a sample from an individual with Type 2 diabetes consists of:
(a) obtaining a nucleic acid sample from said individual; and
(b) subjecting the sample to genetic sequencing, microarray, or PCR analysis to identify the reference or variant allele.

5. The method of claim 1, wherein the step of detecting a reference or a variant allele consists of:
(a) subjecting the sample to automated genetic sequencing;
(b) displaying sequencing data on a data screen for analysis; and
(c) recording the identity of said reference or variant allele at one or more polymorphic loci of SEQ ID NOs: 1-12, 63, and/or 69-75.

6. The method of claim 1, wherein the step of detecting a reference or a variant allele consists of:
(a) obtaining sequence data from the assaying step; and
(b) recording the identity of said reference or variant allele at one or more polymorphic loci of SEQ ID NOs: 1-12, 63, and/or 69-75.

7. The method of claim 5 or 6, further comprising the steps of:
(a) incorporating the identified reference or variant allele data at one or more polymorphic loci of SEQ ID NOs: 1-12, 63, and/or 69-75 into an ANCOVA analysis;
(b) conducting said ANCOVA analysis; and
(c) determining the probability of a favorable response or the magnitude of a favorable change in HbA1C of said individual resulting from treating said individual with a DPP-IV inhibitor or a DPP-IV inhibitor in combination with other oral antidiabetic therapy.

8. The method of claim 5 or 6, further comprising the step of determining the probability of a favorable response or the magnitude of a favorable change in HbA1C of said individual resulting from treating said individual with a DPP-IV inhibitor or a DPP-IV inhibitor in combination with other oral antidiabetic therapy.

9. The method of claim 7 or 8, further comprising the step of administering a DPP-IV inhibitor or a DPP-IV inhibitor in combination with other oral antidiabetic therapy to said individual where said individual is determined to have a probability of a favorable response or a significantly higher magnitude of favorable change in HbA1C resulting from treating said individual with a DPP-IV inhibitor or a DPP-IV inhibitor in combination with other oral antidiabetic therapy.

10. A method of treating an individual with Type 2 diabetes comprising the steps of:
(a) obtaining a nucleic acid sample from said individual;
(b) subjecting the sample to genetic sequencing, microarray, or PCR analysis;
(c) displaying sequencing data on a data screen for analysis;
(d) recording the identity of said reference or variant allele at one or more polymorphic loci of SEQ ID NOs: 1-12, 63, and/or 69-75;
(e) incorporating the identified reference or variant allele data at one or more polymorphic loci of SEQ ID NOs: 1-12, 63, and/or 69-75 into an ANCOVA analysis;
(f) conducting an ANCOVA analysis of said reference or variant allele data;
(g) determining a probability of the likelihood of a favorable response or the magnitude of a favorable change in HbA1C of said individual resulting from treating said individual with a DPP-IV inhibitor or a DPP-IV inhibitor in combination with other oral antidiabetic therapy; and
(h) administering a DPP-IV inhibitor or a DPP-IV inhibitor in combination with other oral antidiabetic therapy to said individual where said individual is determined to have a high probability of likelihood of a favorable response or a significantly high magnitude of a favorable change in HbA1C resulting from treatment of said individual with a DPP-IV inhibitor or a DPP-IV inhibitor in combination with other oral antidiabetic therapy.

11. A method of treating an individual with Type 2 diabetes comprising the steps of:
(a) obtaining a nucleic acid sample from said individual;
(b) subjecting the sample to sequence analysis;
(d) recording the identity of said reference or variant allele at one or more polymorphic loci of SEQ ID NOs: 1-12, 63, and/or 69-75;
(e) determining a probability of the likelihood of a favorable response or the magnitude of a favorable change in HbA1C of said individual resulting from treating said individual with a DPP-IV inhibitor or a DPP-IV inhibitor in combination with other oral antidiabetic therapy; and
(f) administering a DPP-IV inhibitor or a DPP-IV inhibitor in combination with other oral antidiabetic therapy to said individual where said individual is determined to have a high probability of likelihood of a favorable response or a significantly high magnitude of a favorable change in HbA1c resulting from treatment of said individual with a DPP-IV inhibitor or a DPP-IV inhibitor in combination with other oral antidiabetic therapy.

12. The method of claim 9, 10, or 11, wherein said DPP-IV inhibitor is saxagliptin.

13. The method of claim 9, 10, or 11, wherein said other oral antidiabetic therapy is metformin, TZD, or glyburide.

14. The method of claim 7 or 8, wherein said probability of likelihood of a favorable or said significantly high magnitude of a favorable change in HbA1C response to administration of a DPP-IV inhibitor or a DPP-IV inhibitor in combination with other oral antidiabetic therapy is:
greater in individuals homozygous for reference alleles at one or more polymorphic loci of SEQ ID NOs: 1-12, 63, and/or 69-75;
lower in individuals heterozygous for variant alleles at one or more polymorphic loci of SEQ ID NOs: 1-12, 63, and/or 69-75; and
lower in individuals homozygous for variant alleles at one or more polymorphic loci of SEQ ID NOs: 1-12, 63, and/or 69-75.

15. The method of claim 10 or 11, wherein said probability of likelihood of a favorable or said significantly high magnitude of a favorable change in HbA1C response to administration of a DPP-IV inhibitor or a DPP-IV inhibitor in combination with other oral antidiabetic therapy is:
greater in individuals homozygous for reference alleles at one or more polymorphic loci of SEQ ID NOs: 1-12, 63, and/or 69-75;
lower in individuals heterozygous for variant alleles at one or more polymorphic loci of SEQ ID NOs: 1-12, 63, and/or 69-75; and
lower in individuals homozygous for variant alleles at one or more polymorphic loci of SEQ ID NOs: 1-12, 63, and/or 69-75.

16. A diagnostic kit for identifying a subject or patient more likely to have a favorable response to the administration of a therapeutically-effective amount of a DPP-IV inhibitor or a DPP-IV inhibitor in combination with other oral antidiabetic therapy, wherein said kit comprises:
oligonucleotides having SEQ ID NOs: 13-44, 65-66, and 76-103.
